(19) United States
(12) Patent Application Publication
(10) Pub. No.: US 2023/0192896 A1
(43) Pub. Date: Jun. 22, 2023

(54) BISPECIFIC ANTIBODIES BINDING TO COAGULATION FACTOR IX AND COAGULATION FACTOR X

(71) Applicant: Bioverativ Therapeutics Inc., Waltham, MA (US)

(72) Inventors: Robert T. PETERS, Needham, MA (US); Nina LEKSA, Waltham, MA (US); Bradley R. PEARSE, Watertown, MA (US); John KULMAN, Belmont, MA (US); Maria ALEMAN, Waltham, MA (US); Allison GOODMAN, Waltham, MA (US)

(21) Appl. No.: 16/462,878

(22) PCT Filed: Nov. 22, 2017
(86) PCT No.: PCT/US2017/063135

§ 371 Date: May 21, 2019

Related U.S. Application Data
(60) Provisional application No. 62/587,284, filed on Nov. 16, 2017.
(60) Provisional application No. 62/529,805, filed on Jul. 7, 2017.
(60) Provisional application No. 62/452,809, filed on Jan. 31, 2017.
(60) Provisional application No. 62/425,921, filed on Nov. 23, 2016.

(51) Int. Cl. C07K 16/46; A61P 7/04

(52) U.S. Cl. CPC C07K 16/468; A61P 7/04; C07K 2317/565; C07K 2317/31; C07K 2317/34

(57) ABSTRACT

The present disclosure provides antibodies that selectively binds to specific forms of clotting factors, in particular, antibodies that specifically binds to activated factor IX (FIXa) wherein the anti-FIXa antibody or an antigen binding portion thereof preferentially binds to FIXa in the presence of FIXa and factor IX zymogen (FIXz), and antibodies that specifically bind to factor X zymogen (FXz) wherein the anti-FXz antibody or antigen binding portion thereof preferentially binds to FXz in the presence of FXz and activated factor X (FXa). Also provided are bispecific molecules (e.g., antibodies) comprising, e.g., an anti-FIXa antibody or antigen binding portion thereof and/or an anti-FXz antibody or antigen binding portion thereof. The disclosure also provides compositions encoding the disclosed antibodies and bispecific molecules, vectors, cells, pharmaceutical and diagnostic compositions, kits, methods of manufacture, methods of use, and immunoconjugates.

### REFERENCE TO EARLIER FILED APPLICATIONS

[0001] The present application claims benefit to U.S. Provisional Application No. 62/425,921, filed Nov. 23, 2016, U.S. Provisional Application No. 62/452,809, filed Jan. 31, 2017, U.S. Provisional Application No. 62/529,805, filed Jul. 7, 2017, and U.S. Provisional Application No. 62/587,284, filed Nov. 16, 2017, which are incorporated herein by reference in their entireties.

### REFERENCE TO SEQUENCE LISTING SUBMITTED ELECTRONICALLY VIA EFS-WEB

[0002] The content of the electronically submitted sequence listing (Name: 4159.485PC04_Sequence_listing_ST25.txt; Size: 1,053,370 bytes; and Date of Creation: Nov. 21, 2017) filed with the application is incorporated herein by reference in its entirety.

### BACKGROUND

### Field

[0003] This application pertains to, among other things, antibodies that preferentially bind to activated coagulation factor IX or coagulation factor X zymogen, as well as bispecific molecules comprising both specificities that mimic the activated factor VIII cofactor.

### Background

[0004] Hemophilia A is a severe X-chromosome-linked recessive disorder caused by mutations in the factor VIII (FVIII) gene. FVIII is involved in the intrinsic pathway of blood coagulation, and FVIII deficiency leads to blood either coagulating poorly, or barely at all. FVIII deficiency, alternatively known as hemophilia A, is one of the most common hemorrhagic disorders, and affects one in about 10,000 males (Stonebraker et al. (2012) Haemophilia 18(3):e91-4). Hemophilia A has three grades of severity defined by factor FVIII plasma levels of 1% or less (“severe”), 2 to 5% (“moderate”), and 6 to 30% (“mild”) (White et al. (2001) Thromb. Haemost. 85:560). In severe forms of the disorder, the first bleeds typically appear at 5 to 6 months of age, whereas the first bleeds are delayed until about 1 to 2 years of age in the moderate form. A bleed can appear spontaneously, or following minimum trauma. Approximately half of all patients with hemophilia A are classified as having the severe form of the disease. These patients experience severe bleeding starting in early childhood, and frequent episodes of spontaneous or excessive bleeding later in life. Bleeding commonly occurs into joints and muscles, and without appropriate treatment, recurrent bleeding can lead to irreversible hemoarthropathy (Manco-Johnson et al. (2007) N. Engl. J. Med. 357(6):535-44).

[0005] An important goal of hemophilia A treatment is maintenance of FVIII plasma levels ≥1%, which reduces bleeding risk. To achieve this, intravenous recombinant or plasma-derived FVIII is administered frequently as prophylactic therapy. However, this current standard of treatment of hemophilia A is difficult, has several drawbacks, and incurs a considerable physical and mental burden on patients and their families.

[0006] The most common hindrance in FVIII treatment is the production of alloantibodies against FVIII, which act as FVIII inhibitors. As many as 30% of severely affected patients develop such alloantibodies, and once development has occurred, the effective use of FVIII for treating on-going bleeds is restricted (Kempton & White (2009) Blood 113(1):11-7). In such cases, alternative bypassing agents are used to control bleeding. However, these agents typically have shorter half-lives and are not always effective. Furthermore, frequent administration of FVIII is required due to its short plasma half-life (an average of about 12 hours in adults, and even shorter in children). Such a regimen can be difficult, particularly in young children. Since available treatments are associated with complications and side effects, there is no single treatment that optimally and effectively treats hemophilia. Thus, there remains an unmet need for new and effective treatments that resolve the drawbacks of treating hemophilia A with FVIII.

### BRIEF SUMMARY

[0007] The present disclosure provides an isolated antibody, or an antigen binding portion thereof, that specifically binds to activated factor IX (FIXa) (“anti-FIXa antibody or antigen binding portion thereof”), wherein the anti-FIXa antibody or antigen binding portion thereof preferentially binds to FIXa in the presence of FIXa and factor IX zymogen (FIXz). In some aspects, the anti-FIXa antibody, or antigen binding portion thereof binds to FIXa with a binding affinity higher than a binding affinity of the anti-FIXa antibody or antigen binding portion thereof to FIXz. The disclosure also provides an isolated anti-FIXa antibody, or antigen binding portion thereof, which binds to FIXa with a binding affinity higher than a binding affinity of the anti-FIXa antibody or antigen binding portion thereof to FIXz. In some aspects, the anti-FIXa antibody, or antigen binding portion thereof binds to FIXa with a K_{D} of about 100 nM or less, about 90 nM or less, about 80 nM or less, about 70 nM or less, about 60 nM or less, about 50 nM or less, about 40 nM or less, about 30 nM or less, about 20 nM or less, about 10 nM or less, about 8 nM or less, about 6 nM or less, about 4 nM or less, about 2 nM or less, about 1 nM or less as determined by a Bio-Layer Interferometry (BLI) assay. In some aspects, the FIXa is free FIXa, FIXa in a tenase complex, or FIXa covalently linked to EGR-CMK (FIXa-SM). In some aspects, the FIXz comprises non-activatable Factor IX (FIXn). In some aspects, the anti-FIXa antibody, or antigen binding portion thereof cross-competes with a reference antibody selected from the group consisting of the antibodies in FIG. 3A, FIG. 3B, and FIG. 3C. In some aspects, the anti-FIXa antibody, or antigen binding portion thereof binds to the same epitope as a reference antibody selected from the group consisting of the antibodies in FIG. 3A, FIG. 3B, and FIG. 3C. In some aspects, such reference antibody is selected from BIIB-9-484, BIIB-9-440, BIIB-9-882, BIIB-9-460, BIIB-9-433, and any combination thereof. In some aspects, the anti-FIXa antibody, or antigen binding portion thereof preferentially binds to FIXa-SM compared to free FIXa or FIXz and/or binds to FIXa-SM with a binding affinity higher than a binding affinity of the anti-FIXa antibody or antigen binding portion thereof to free FIXa or FIXz. In some aspects, the anti-FIXa antibody, or antigen binding portion thereof cross-competes with a reference antibody selected from the group consisting of the antibodies in FIG. 3A. In some aspects, the anti-FIXa antibody, or antigen binding portion thereof binds to the same epitope as a reference antibody selected from the group consisting of the antibodies in FIG. 3A. In some aspects, such reference antibody is selected from BIIB-9-484, BIIB-9-440, BIIB-9-460, and any combination thereof. In some aspects, the anti-FIXa antibody, or antigen binding portion thereof preferentially binds to free FIXa compared to FIXa-SM or FIXz and/or binds to free FIXa with a binding affinity higher than a binding affinity of the anti-FIXa antibody or antigen binding portion thereof to FIXa-SM or FIXz. In some aspects, the anti-FIXa antibody, or antigen binding portion thereof, cross-competes with a reference antibody selected from the group consisting of the antibodies in FIG. 3B. In some aspects, the anti-FIXa antibody, or antigen binding portion thereof binds to the same epitope as a reference antibody selected from the group consisting of the antibodies in FIG. 3B. In some aspects, the anti-FIXa antibody, or antigen binding portion thereof preferentially binds to free FIXa or FIXa-SM compared to FIXz and/or binds to free FIXa or FIXa-SM with a binding affinity higher than a binding affinity of the anti-FIXa antibody or antigen binding portion thereof to FIXz. In some aspects, the anti-FIXa antibody, or antigen binding portion thereof cross-competes with a reference antibody selected from the group consisting of the antibodies in FIG. 3C. In some aspects, the anti-FIXa antibody, or antigen binding portion thereof binds to the same epitope as a reference antibody selected from the group consisting of the antibodies in FIG. 3C. In some aspects, such reference antibody is selected from BIIB-9-882, BIIB-9-433, and the combination thereof. In some aspects, the anti-FIXa antibody, or antigen binding portion thereof comprises CDR1, CDR2, and CDR3, wherein the CDR3 comprises a VH CDR3 selected from the group consisting of VH CDR3s in FIG. 3A, FIG. 3B, and FIG. 3C or the VH CDR3 with one or two mutations. In some aspects, the anti-FIXa antibody, or antigen binding portion thereof comprises CDR1, CDR2, and CDR3, wherein the CDR3 comprises ARDX₁X₂X₃X₄X₅X₆YYX₇MDV (SEQ ID NO:753), wherein X₁ is V or G, X₂ is G or V, X₃ is G or R, X₄ is Y or V, X₅ is A or S, X₆ is G or D, X₇ is G or none. In some aspects, the CDR3 comprises ARDVGGYAGYYGMDV (SEQ ID NO: 905, BIIB-9-484, 1335, 1336), ARDISTDGESSLYYYMDV (SEQ ID NO: 901, BIIB-9-460), ARGPTDSSGYLDMDV (SEQ ID NO: 1186, BIIB-9-882), or ARDGPRVSDYY MDV (SEQ ID NO: 912, BIIB-9-619). In some aspects, the anti-FIXa antibody, or antigen binding portion thereof comprises CDR1, CDR2, and CDR3, wherein the CDR1 comprises a VH CDR1 selected from the group consisting of VH CDR1s in FIG. 3A, FIG. 3B, and FIG. 3C or the VH CDR1 with one or two mutations. In some aspects, the anti-FIXa antibody, or antigen binding portion thereof comprises VH CDR1, CDR2, and CDR3, wherein the CDR2 comprises a VH CDR2 selected from the group consisting of VH CDR2s in FIG. 3A, FIG. 3B, and FIG. 3C or the VH CDR2 with one or two mutations. In some aspects, the anti-FIXa antibody, or antigen binding portion thereof comprises VL CDR1, CDR2, and CDR3, wherein the CDR1 comprises a VL CDR1 selected from the group consisting of VL CDR1s in FIG. 3A, FIG. 3B, and FIG. 3C or the VL CDR1 with one or two mutations. In some aspects, the anti-FIXa antibody, or antigen binding portion thereof comprises VL CDR1, CDR2, and CDR3, wherein the CDR2 comprises a VL CDR2 selected from the group consisting of VL CDR2s in FIG. 3A, FIG. 3B, and FIG. 3C or the VL CDR2 with one or two mutations. In some aspects, the anti-FIXa antibody, or antigen binding portion thereof comprises VL CDR1, CDR2, and CDR3, wherein the CDR3 comprises a VL CDR3 selected from the group consisting of VL CDR3s in FIG. 3A, FIG. 3B, and FIG. 3C or the VL CDR3 with one or two mutations.

[0008] The present disclosure also provides an isolated anti-FIXa antibody, or antigen binding portion thereof, which specifically binds to FIXa, comprising VH CDR1, CDR2, and CDR3 and VL CDR1, CDR2, and CDR3, wherein the VH CDR1, CDR2, and CDR3 and the VL CDR1, CDR2, and CDR3 comprise VH CDR1, VH CDR2, and VH CDR3 and VL CDR1, CDR2, and CDR3 of FIG. 3A, FIG. 3B, and FIG. 3C, respectively. In some aspects, the anti-FIXa antibody or antigen binding portion thereof comprises VH CDR1, CDR2, and CDR3 sequences comprising SEQ ID NOs: 815, 860, and 905, respectively, and/or VL CDR1, CDR2, and CDR3 sequences comprising SEQ ID NOs: 950, 995, and 1040, respectively (BIIB-9-484). In some aspects, the anti-FIXa antibody, or antigen binding portion thereof comprises VH CDR1, CDR2, and CDR3 sequences comprising SEQ ID NO: 809, SEQ ID NO: 854, and SEQ ID NO: 899, respectively, and/or VL CDR1, VL CDR2, and VL CDR3 sequences comprising SEQ ID NO: 944, SEQ ID NO: 989, and SEQ ID NO: 1034, respectively (BIIB-9-440). In some aspects, the anti-FIXa antibody, or antigen binding portion thereof comprises VH CDR1, CDR2, and CDR3 sequences comprising SEQ ID NO: 1102, SEQ ID NO: 1144, and SEQ ID NO: 1186, respectively, and/or VL CDR1, VL CDR2, and VL CDR3 sequences comprising SEQ ID NO: 1228, SEQ ID NO: 1270, and SEQ ID NO: 1312, respectively (BIIB-9-882). In some aspects, the anti-FIXa antibody, or antigen binding portion thereof comprises VH CDR1, CDR2, and CDR3 sequences comprising SEQ ID NO: 811, SEQ ID NO: 856, and SEQ ID NO: 901, respectively, and/or VL CDR1, VL CDR2, and VL CDR3 sequences comprising SEQ ID NO: 946, SEQ ID NO: 991, and SEQ ID NO: 1036, respectively (BIIB-9-460). In some aspects, the anti-FIXa antibody, or antigen binding portion thereof comprises VH CDR1, CDR2, and CDR3 sequences comprising SEQ ID NO: 1108, SEQ ID NO: 1150, and SEQ ID NO: 1192, respectively, and/or VL CDR1, VL CDR2, and VL CDR3 sequences comprising SEQ ID NO: 1234, SEQ ID NO: 1276, and SEQ ID NO: 1318, respectively (BIIB-9-433). In some aspects, the anti-FIXa antibody, or antigen binding portion thereof comprises VH CDR1, CDR2, and CDR3 sequences comprising SEQ ID NO: 822, SEQ ID NO: 867, and SEQ ID NO: 912, respectively, and/or VL CDR1, VL CDR2, and VL CDR3 sequences comprising SEQ ID NO: 957, SEQ ID NO: 1002, and SEQ ID NO: 1047, respectively (BIIB-9-619). In some aspects, the anti-FIXa antibody, or antigen binding portion thereof comprises VH CDR1, CDR2, and CDR3 sequences comprising SEQ ID NO: 843, SEQ ID NO: 888, and SEQ ID NO: 933, respectively, and/or VL CDR1, VL CDR2, and VL CDR3 sequences comprising SEQ ID NO: 950, SEQ ID NO: 995, and SEQ ID NO: 1040, respectively, respectively or (ii) the anti-FIXa antibody, or antigen binding portion thereof comprises VH CDR1, CDR2, and CDR3 sequences comprising SEQ ID NO: 844, SEQ ID NO: 889, and SEQ ID NO: 934, respectively, and/or VL CDR1, VL CDR2, and VL CDR3 sequences comprising SEQ ID NO: 950, SEQ ID NO: 995, and SEQ ID NO: 1040, respectively (BIIB-9-1335 and BIIB-9-1336). the anti-FIXa antibody, or antigen binding portion thereof comprises a VH and a VL, wherein the VH comprises an amino acid sequence which is at least about 80%, at least about 85%, at least about 90%, at least about 95%, at least about 96%, at least about 97%, at least about 98%, at least about 99%, or about 100% identical to the amino acid sequence selected from the group consisting of SEQ ID NOs: 1, 3, 5, 7, 9, 11, 13, 15, 17, 19, 21, 23, 25, 27, 29, 31, 33, 35, 37, 39, 41, 43, 45, 47, 49, 51, 53, 55, 57, 59, 61, 63, 65, 67, 69, 71, 73, 75, 77, 79, 81, 83, 85, 87, 89, 91, 93, 95, 97, 99, 101, 103, 105, 107, 109, 111, 113, 115, 117, 119, 121, 123, 125, 127, 129, 131, 133, 135, 137, 139, 141, 143, 145, 147, 149, 151, 153, 155, 157, 159, 161, 163, 165, 167, 169, 171, 173, 175, 177, 179, and 181. In some aspects, the anti-FIXa antibody, or antigen binding portion thereof comprises a VH and a VL, wherein the VL comprises an amino acid sequence which is at least about 80%, at least about 85%, at least about 90%, at least about 95%, at least about 96%, at least about 97%, at least about 98%, at least about 99%, or about 100% identical to the amino acid sequence selected from the group consisting of SEQ ID NOs: 191, 193, 195, 197, 199, 201, 203, 205, 207, 209, 211, 213, 215, 217, 219, 221, 223, 225, 227, 229, 231, 233, 235, 237, 239, 241, 243, 245, 247, 249, 251, 253, 255, 257, 259, 261, 263, 265, 267, 269, 271, 273, 275, 277, 279, 281, 283, 285, 287, 289, 291, 293, 295, 297, 299, 301, 303, 305, 307, 309, 311, 313, 315, 317, 319, 321, 323, 325, 327, 329, 331, 333, 335, 337, 339, 341, 343, 345, 347, 349, 351, 353, 355, 357, 359, 361, 363, 365, and 367. In some aspects, the anti-FIXa antibody, or antigen binding portion thereof comprises a VH and a VL, wherein the VH is derived from a germline sequence of VH1-46.0, VH1-46.4, VH1-46.5, VH1-46.7, VH1-46.9, VH1-69.9, VH3-07.0, VH3-21.0, VH3-21.2, VH3-23.0, VH3-23.1, VH4-31.0, VH4-34.0, VH4-39.0, VH4-39.2, VH4-39.3, VH4-39.5, VH4-39.6, VH4-39.8, VH4-59.6, VH4-0B.4, or VH4-0B.6. In some aspects, the anti-FIXa antibody, or antigen binding portion thereof comprises a VH and a VL, wherein the VL is derived from a germline sequence of VK1-05.0, VK1-05.6, VK1-05.9, VK1-05.21, VK1-12.0, VK1-12.3, VK1-33.0, VK1-33.1, VK1-33.2, VK1-33.8, VK1-33.10, VK1-39.0, VK1-39.6, VK2-28.0, VK2-28.1, VK3-11.0, VK3-11.2, VK3-11.6, VK3-11.10, VK3-11.14, VK3-15.0, VK3-15.6, VK3-15.8, VK3-15.11, VK3-15.20, VK3-15.26, VK3-20.0, VK3-20.4, VK3-20.5, VK3-20.8, or VK4-01.0. In some aspects, the anti-FIXa antibody, or antigen binding portion thereof comprises a VH and a VL, wherein (a1) VH and VL comprise SEQ ID NOs: 31 and 221, respectively (BIIB-9-484); (a2) VH and VL comprise SEQ ID NOs: 19 and 209, respectively (BIIB-9-440); (a3) VH and VL comprise SEQ ID NOs: 115 and 301, respectively (BIIB-9-882); (a4) VH and VL comprise SEQ ID NOs: 23 and 213, respectively (BIIB-9-460); (a5) VH and VL comprise SEQ ID NOs: 127 and 313, respectively (BIIB-9-433); (a6) VH and VL comprise SEQ ID NOs: 45 and 235, respectively (BIIB-9-619); (a7) VH and VL comprise SEQ ID NOs: 185 and 371, respectively (BIIB-9-578); (a8) VH and VL comprise SEQ ID NOs: 87 and 221, respectively (BIIB-9-1335); or, (a9) VH and VL comprise SEQ ID NOs: 89 and 221, respectively (BIIB-9-1336).

[0009] The present disclosure also provides an isolated antibody, or an antigen binding portion thereof, which specifically binds to FIXz (“anti-FIXz antibody or antigen binding portion thereof”), wherein the anti-FIXz antibody or antigen binding portion thereof preferentially binds to FIXz in the presence of free FIXa or FIXa-SM and/or the anti-FIXz antibody or antigen binding portion thereof binds to FIXz with a binding affinity higher than a binding affinity of the anti-FIXz antibody or antigen binding portion thereof to free FIXa or FIXa-SM. In some aspects, the anti-FIXz antibody, or antigen binding portion thereof cross-competes with a reference antibody selected from the group consisting of the antibodies in FIG. 3D. In some aspects, the anti-FIXz antibody, or antigen binding portion thereof binds to the same epitope as a reference antibody selected from the group consisting of the antibodies in FIG. 3D. In some aspects, such reference antibody is BIIB-9-578. In some aspects, the anti-FIXz antibody, or antigen binding portion thereof comprises CDR1, CDR2, and CDR3, wherein the CDR3 comprises a VH CDR3 selected from the group consisting of VH CDR3s in FIG. 3D or the VH CDR3 with one or two mutations. In some aspects, the CDR3 comprises ARDKYQDYSFDI (SEQ ID NO: 1355, BIIB-9-578). In some aspects, the anti-FIXz antibody, or antigen binding portion thereof comprises CDR1, CDR2, and CDR3, wherein the CDR1 comprises a VH CDR1 selected from the group consisting of VH CDR1s in FIG. 3D or the VH CDR1 with one or two mutations. In some aspects, the anti-FIXz antibody, or antigen binding portion thereof comprises VH CDR1, CDR2, and CDR3, wherein the CDR2 comprises a VH CDR2 selected from the group consisting of VH CDR2s in FIG. 3D or the VH CDR2 with one or two mutations. In some aspects, the anti-FIXz antibody, or antigen binding portion thereof comprises VL CDR1, CDR2, and CDR3, wherein the CDR1 comprises a VL CDR1 selected from the group consisting of VL CDR1s in FIG. 3D or the VL CDR1 with one or two mutations. In some aspects, the anti-FIXz antibody, or antigen binding portion thereof comprises VL CDR1, CDR2, and CDR3, wherein the CDR2 comprises a VL CDR2 selected from the group consisting of VL CDR2s in FIG. 3D or the VL CDR2 with one or two mutations. In some aspects, the anti-FIXz antibody, or antigen binding portion thereof comprises VL CDR1, CDR2, and CDR3, wherein the CDR3 comprises a VL CDR3 selected from the group consisting of VL CDR3s in FIG. 3D or the VL CDR3 with one or two mutations. In some aspects, the anti-FIX antibody is selected from the group consisting of an IgG1, an IgG2, an IgG3, an IgG4 or a variant thereof. In some aspects, the anti-FIX antibody is an IgG4 antibody. In some aspects, the anti-FIX antibody comprises an effectorless IgG4 Fc. In some aspects, the anti-FIX antibody, or antigen binding portion thereof comprises a heavy chain constant region. In some aspects, the anti-FIX antibody is a human antibody, an engineered antibody, or a humanized antibody. In some aspects, the anti-FIX antigen binding portion comprises an Fab, Fab′, F(ab′)2, Fv, or a single chain Fv (scFv).

[0010] The present disclosure also provides a bispecific molecule comprising an anti-FIX antibody or antigen binding portion thereof disclosed herein linked to a molecule having a second binding specificity. Also provides is a nucleic acid encoding the heavy and/or light chain variable region of an anti-FIX antibody, or antigen binding portion thereof disclosed herein or a bispecific molecule comprising an anti-FIX antibody, or antigen binding portion thereof disclosed herein. Also provided is an expression vector comprising a nucleic acid molecule encoding a disclosed herein. Also provided is a cell transformed with an expression vector disclosed herein. The present disclosure also provides an immunoconjugate comprising any antibody or antigen binding portion thereof disclosed herein or a bispecific molecule disclosed herein, linked to an agent. The present disclosure also provides a composition comprising (i) an antibody disclosed herein or an antigen binding portion thereof, a bispecific molecule disclosed herein, or an immunoconjugate disclosed herein, and (ii) a carrier. Also provide is a kit comprising (i) an antibody disclosed herein or an antigen binding portion thereof, a bispecific molecule disclosed herein, or an immunoconjugate disclosed herein, and (ii) instructions for use.

[0011] The present disclosure also provides a method of preparing an anti-FIX antibody, or antigen binding portion thereof, comprising expressing the antibody, or antigen binding portion thereof in a cell and isolating the antibody, or antigen binding portion thereof, from the cell. Also provided is a method of measuring a level of activated FIX in a subject in need thereof comprising contacting an anti-FIXa antibody disclosed herein or an antigen binding portion thereof, with a sample obtained from the subject under suitable conditions and measuring the binding of the anti-FIXa antibody or antigen binding portion thereof to FIXa in the sample. In some aspects, the sample is blood or serum.

[0012] The present disclosure provides an isolated antibody, or an antigen binding portion thereof, that specifically binds to factor X zymogen (FXz) (“anti-FXz antibody or antigen binding portion thereof”), wherein the anti-FXz antibody or antigen binding portion thereof preferentially binds to FXz in the presence of FXz and activated factor X (FXa). In some aspects, the anti-FXz antibody, or antigen binding portion thereof binds to FXz with a binding affinity higher than a binding affinity of the antibody or antigen binding portion thereof to FXa. Also provided is an isolated anti-FXz antibody, or antigen binding portion thereof, which binds to FXz with a binding affinity higher than a binding affinity of the antibody or antigen binding portion thereof to FXa. In some aspects, the anti-FXz antibody, or antigen binding portion thereof, binds to FXz with a K_{D} of about 100 nM or less, about 90 nM or less, about 80 nM or less, about 70 nM or less, about 60 nM or less, about 50 nM or less, about 40 nM or less, about 30 nM or less, about 20 nM or less, about 10 nM or less, about 9 nM or less, about 8 nM or less, about 7 nM or less, about 6 nM or less, about 5 nM or less, about 4 nM or less, about 3 nM or less, about 2 nM or less, about 1 nM or less as measured by BLI. In some aspects, the FXa is free FXa or FXa covalently linked to EGR-CMK (FIXa-SM). In some aspects, the FXz comprises non-activatable Factor X (FXn). In some aspects, the anti-FXz antibody, or antigen binding portion thereof cross-competes with a reference antibody selected from the group consisting of the antibodies in FIG. 12A and FIG. 12B. In some aspects, the anti-FXz antibody, or antigen binding portion thereof, binds to the same epitope as a reference antibody selected from the group consisting of the antibodies in FIG. 12A and FIG. 12B. In some aspects, the anti-FXz antibody, or antigen binding portion thereof, binds to the same epitope as a reference antibody selected from the group consisting of BIIB-12-915, BIIB-12-917, BIIB-12-932, and any combination thereof. In some aspects, the anti-FXz antibody, or antigen binding portion thereof, comprises CDR1, CDR2, and CDR3, wherein the CDR3 comprises a VH CDR3 selected from the group consisting of VH CDR3s in FIG. 12A and FIG. 12B or the VH CDR3 with one or two mutations. In some aspects, the anti-FXz antibody, or antigen binding portion thereof, comprises CDR1, CDR2, and CDR3, wherein the CDR3 comprises ARX₁X₂X₃RX₄X₅X₆X₇FDX₈ (SEQ ID NO: 766), wherein X₁ is G or L, X₂ is R or G, X₃ is F or Y, X₄ is P or G, X₅ is R or A, X₆ is G or S, X₇ is R or A, and X₈ is Y or I. In some aspects, the anti-FXz antibody, or antigen binding portion thereof, comprises CDR1, CDR2, and CDR3, wherein the CDR3 comprises ARGRFRPRGRFDY (SEQ ID NO: 1575, BIIB-12-917), ARLGYRGASAFDI (SEQ ID NO: 1589, BIIB-12-932), or ARVGGGYANP (SEQ ID NO: 1573, BIIB-12-915). In some aspects, the anti-FXz antibody, or antigen binding portion thereof, comprises VH CDR1, CDR2, and CDR3, wherein the CDR1 comprises a VH CDR1 selected from the group consisting of VH CDR1s in FIG. 12A and FIG. 12B or the VH CDR1 with one or two mutations. In some aspects, the anti-FXz antibody, or antigen binding portion thereof, comprises VH CDR1, CDR2, and CDR3, wherein the CDR2 comprises a VH CDR2 selected from the group consisting of VH CDR2s in FIG. 12A and FIG. 12B or the VH CDR2 with one or two mutations. In some aspects, the anti-FXz antibody, or antigen binding portion thereof, comprises VL CDR1, CDR2, and CDR3, wherein the CDR1 comprises a VL CDR1 selected from the group consisting of VL CDR1s in FIG. 12A and FIG. 12B or the VL CDR1 with one or two mutations. In some aspects, the anti-FXz antibody, or antigen binding portion thereof, comprises VL CDR1, CDR2, and CDR3, wherein the CDR2 comprises a VL CDR2 selected from the group consisting of VL CDR2s in FIG. 12A and FIG. 12B or the VL CDR2 with one or two mutations. In some aspects, the anti-FXz antibody, or antigen binding portion thereof, comprises VL CDR1, CDR2, and CDR3, wherein the CDR3 comprises a VL CDR3 selected from the group consisting of VL CDR3s in FIG. 12A and FIG. 12B or the VL CDR3 with one or two mutations.

[0013] The present disclosure also provides an isolated antibody, or antigen binding portion thereof, which specifically binds to FXz, comprising VH CDR1, CDR2, and CDR3 and VL CDR1, CDR2, and CDR3, wherein the VH CDR1, CDR2, and CDR3 and VL CDR1, CDR2, and CDR3 comprise VH CDR1, CDR2, and CDR3 and VL CDR1, CDR2, and CDR3 of FIG. 12A and FIG. 12B, respectively. In some aspects, the anti-FXz antibody, or antigen binding portion thereof, comprises VH CDR1, CDR2, and CDR3 sequences comprising SEQ ID NOs: 1393, 1483, or 1573, respectively, and/or VL CDR1, VL CDR2, and VL CDR3 sequences comprising SEQ ID NOs: 1663, 1753, or 1843, respectively (BIIB-12-915). In some aspects, the anti-FXz antibody, or antigen binding portion thereof, comprises VH CDR1, CDR2, and CDR3 sequences comprising SEQ ID NOs: 1395, 1485, or 1575, respectively, and/or VL CDR1, VL CDR2, and VL CDR3 sequences comprising SEQ ID NOs: 1665, 1755, or 1845, respectively (BIIB-12-917). In some aspects, the anti-FXz antibody, or antigen binding portion thereof, comprises VH CDR1, CDR2, and CDR3 sequences comprising SEQ ID NOs: 1409, 1499, or 1589, respectively, and/or VL CDR1, VL CDR2, and VL CDR3 sequences comprising SEQ ID NOs: 1679, 1769, or 1859, respectively (BIIB-12-932). In some aspects, the anti-FXz antibody, or antigen binding portion thereof, comprises VH and VL, wherein the VH comprises an amino acid sequence which is at least about 80%, at least about 85%, at least about 90%, at least about 95%, at least about 96%, at least about 97%, at least about 98%, at least about 99%, or about 100% identical to the amino acid sequence selected from the group consisting of SEQ ID NOs: 377, 379, 381, 383, 385, 387, 389, 391, 393, 395, 397, 399, 401, 403, 405, 407, 409, 411, 413, 415, 417, 419, 421, 423, 425, 427, 429, 431, 433, 435, 437, 439, 441, 443, 445, 447, 449, 451, 453, 455, 457, 459, 461, 463, 465, 467, 469, 471, 473, 475, 477, 479, 481, 483, 485, 487, 489, 491, 493, 495, 497, 499, 501, 503, 505, 507, 509, 511, 513, 515, 517, 519, 521, 523, 525, 527, 529, 531, 533, 535, 537, 539, 541, 543, 545, 547, 549, 551, 553, and 555. In some aspects, the anti-FXz antibody, or antigen binding portion thereof, comprises VH and VL, wherein the VL comprises an amino acid sequence which is at least about 80%, at least about 85%, at least about 90%, at least about 95%, at least about 96%, at least about 97%, at least about 98%, at least about 99%, or about 100% identical to the amino acid sequence selected from the group consisting of SEQ ID NOs: 565, 567, 569, 571, 573, 575, 579, 581, 583, 585, 587, 589, 591, 593, 595, 597, 599, 601, 603, 605, 607, 609, 611, 613, 615, 617, 619, 621, 623, 625, 627, 629, 631, 633, 635, 637, 639, 641, 643, 645, 647, 649, 651, 653, 655, 657, 659, 661, 663, 665, 667, 669, 671, 673, 675, 677, 679, 681, 683, 685, 687, 689, 691, 693, 695, 697, 699, 701, 703, 705, 707, 709, 711, 713, 715, 717, 719, 721, 723, 725, 727, 729, 731, 733, 735, 737, 739, 741, and 743. In some aspects, the anti-FXz antibody, or antigen binding portion thereof, comprises a VH and a VL, wherein the VH is derived from a germline sequence of VH1-18.0, VH1-18.1, VH1-18.8, VH1-46.0, VH1-46.4, VH1-46.5, VH1-46.6, VH1-46.7, VH1-46.8, VH1-46.9, VH3-21.0, VH3-23.0, VH3-23.2, VH3-23.6, VH3-30.0, VH4-31.5, VH4-39.0, VH4-39.5. VH4-0B.4, or VH5-51.1. In some aspects, the anti-FXz antibody, or antigen binding portion thereof, comprises a VH and a VL, wherein the VL is derived from a germline sequence of VK1-05.6, VK1-05.12, VK1-12.0, VK1-12.4, VK1-12.7, VK1-12.10, VK1-12.15, VK1-39.0, VK1-39.3, VK1-39.15, VK2-28.0, VK2-28.1, VK2-28.5, VK3-11.0, VK3-11.2, VK3-11.6, VK3-11.14, VK3-15.0, VK3-15.8, VK3-15.10, VK3-20.0, VK3-20.1, VK3-20.4, VK3-20.5, VK4-01.0, VK4-01.4, VK4-01.20. In some aspects, the anti-FX antibody, or antigen binding portion thereof, comprises VH and VL, wherein (b1) VH and VL comprise SEQ ID NOs: 423 and 611, respectively (BIIB-12-915); (b2) VH and VL comprise SEQ ID NOs: 427 and 615, respectively (BIIB-12-917); or (b3) VH and VL comprise SEQ ID NOs: 455 and 643, respectively (BIIB-12-932).

[0014] The present disclosure also provides an isolated antibody, or an antigen binding portion thereof, that specifically binds to activated factor X (FXa) (“anti-FXa antibody or antigen binding portion thereof”), wherein the anti-FXa antibody or antigen binding portion thereof preferentially binds to FXa in the presence of FXz and FXa and/or binds to FXa with a binding affinity higher than a binding affinity of the antibody or antigen binding portion thereof to FXz. In some aspects, the anti-FXa antibody, or antigen binding portion thereof, cross-competes with a reference antibody selected from the group consisting of the antibodies in FIG. 12C. In some aspects, the anti-FXa antibody, or antigen binding portion thereof, binds to the same epitope as a reference antibody selected from the group consisting of the antibodies in FIG. 12C. In some aspects, the anti-FXa antibody, or antigen binding portion thereof, binds to the same epitope as a reference antibody selected from the group consisting of BIIB-12-925. In some aspects, the anti-FXa antibody, or antigen binding portion thereof, comprises CDR1, CDR2, and CDR3, wherein the CDR3 comprises a VH CDR3 selected from the group consisting of VH CDR3s in FIG. 12C or the VH CDR3 with one or two mutations. In some aspects, the anti-FXa antibody, or antigen binding portion thereof, comprises CDR1, CDR2, and CDR3, wherein the CDR3 comprises AKGPRYYWYSWYFDL (SEQ ID NO: 1919, BIIB-12-925). In some aspects, the anti-FXa antibody, or antigen binding portion thereof, comprises VH CDR1, CDR2, and CDR3, wherein the CDR1 comprises a VH CDR1 selected from the group consisting of VH CDR1s in FIG. 12C or the VH CDR1 with one or two mutations. In some aspects, the anti-FXa antibody, or antigen binding portion thereof, comprises VH CDR1, CDR2, and CDR3, wherein the CDR2 comprises a VH CDR2 selected from the group consisting of VH CDR2s in FIG. 12C or the VH CDR2 with one or two mutations. In some aspects, the anti-FXa antibody, or antigen binding portion thereof, comprises VL CDR1, CDR2, and CDR3, wherein the CDR1 comprises a VL CDR1 selected from the group consisting of VL CDR1s in FIG. 12C or the VL CDR1 with one or two mutations. In some aspects, the anti-FXa antibody, or antigen binding portion thereof, comprises VL CDR1, CDR2, and CDR3, wherein the CDR2 comprises a VL CDR2 selected from the group consisting of VL CDR2s in FIG. 12C or the VL CDR2 with one or two mutations. In some aspects, the anti-FXa antibody, or antigen binding portion thereof, comprises VL CDR1, CDR2, and CDR3, wherein the CDR3 comprises a VL CDR3 selected from the group consisting of VL CDR3s in FIG. 12C or the VL CDR3 with one or two mutations.

[0015] The present disclosure also provides an isolated antibody, or antigen binding portion thereof, which specifically binds to FXa, comprising VH CDR1, CDR2, and CDR3 and VL CDR1, CDR2, and CDR3, wherein the VH CDR1, CDR2, and CDR3 and VL CDR1, CDR2, and CDR3 comprise VH CDR1, CDR2, and CDR3 and VL CDR1, CDR2, and CDR3 of FIG. 12C, respectively. In some aspects, the anti-FXa antibody, or antigen binding portion thereof, comprises VH CDR1, CDR2, and CDR3 sequences comprising SEQ ID NOs: 1911, 1915, or 1919, respectively, and/or VL CDR1, VL CDR2, and VL CDR3 sequences comprising SEQ ID NOs: 1923, 1927, or 1931, respectively (BIIB-12-925). In some aspects, the anti-FXa antibody, or antigen binding portion thereof, comprises VH and VL, wherein the VH and VL comprise SEQ ID NOs: 559 and 747, respectively (BIIB-12-925). In some aspects, the anti-FX antibody, or antigen binding portion thereof, is selected from the group consisting of an IgG1, an IgG2, an IgG3, an IgG4 or a variant thereof. In some aspects, the anti-FX antibody, or antigen binding portion thereof, is an IgG4 antibody. In some aspects, the anti-FX antibody, or antigen binding portion thereof, comprises an effectorless IgG4 Fc. In some aspects, the anti-FX antibody, or antigen binding portion thereof, comprises a heavy chain constant region. In some aspects, the anti-FX antibody is a human antibody, an engineered antibody, or a humanized antibody. In some aspects, the antigen binding portion thereof comprises an Fab, Fab′, F(ab′)2, Fv, or a single chain Fv (scFv). The present disclosure also provides a bispecific molecule comprising an anti-FX antibody disclosed herein linked to a molecule having a second binding specificity. Also provided is a nucleic acid encoding the heavy and/or light chain variable region of an anti-FX antibody disclosed herein, or antigen binding portion thereof, or a bispecific molecule comprising an anti-FX antibody or antigen binding portion thereof disclosed herein. Also provided is an expression vector comprising the nucleic acid molecule. Also provided is a cell transformed with the expression vector. Also provided is an immunoconjugate comprising the antibody, or antigen binding portion thereof, or the bispecific molecule, linked to an agent. Also provided is a composition comprising (i) the antibody, or antigen binding portion thereof, or the bispecific molecule, or the immunoconjugate, and (ii) a carrier. Also provided is a kit comprising (i) the antibody, or antigen binding portion thereof, or the bispecific molecule, or the immunoconjugate, and (ii) instructions for use. Also provided is a method of preparing an anti-FX antibody, or antigen binding portion thereof, comprising expressing the antibody, or antigen binding portion thereof, in a cell and isolating the antibody, or antigen binding portion thereof, from the cell.

[0016] The present disclosure also provides a method of measuring zymogen FX (FXz) in a subject in need thereof comprising contacting the anti-FX antibody, or antigen binding portion thereof, disclosed herein with a sample obtained from the subject under suitable conditions and measuring the binding of the anti-FX antibody or antigen binding portion thereof to FXz in the sample. In some aspects, the sample is blood or serum from the subject. The present disclosure also provides a bispecific molecule comprising (i) an anti-FIX antibody, or antigen binding portion thereof, disclosed herein, and (ii) an anti-FX antibody, or antigen binding portion thereof, disclosed herein. In some aspects, the bispecific molecule cross-competes with a reference bispecific antibody, wherein the reference bispecific antibody comprises a VH and a VL of an anti-FIX antibody selected from the group consisting of the anti-FIX antibodies in FIG. 3A, FIG. 3B, FIG. 3C, and FIG. 3D, and a VH and a VL of an anti-FX antibody selected from the group consisting of the anti-FX antibodies in FIG. 12A, FIG. 12B, and FIG. 12C. In some aspects, the bispecific molecule binds to the same epitope as a reference bispecific antibody, wherein the reference bispecific antibody comprises a VH and a VL of an anti-FIX antibody selected from the group consisting of the anti-FIX antibodies in FIG. 3A, FIG. 3B, FIG. 3C, and FIG. 3D and a VH and a VL of an anti-FX antibody selected from the group consisting of the anti-FX antibodies in FIG. 12A, FIG. 12B, and FIG. 12C. In some of aspects of the bispecific molecules disclosed herein (i) the anti-FIX antibody, or antigen binding portion thereof, comprises VH CDR1, CDR2, and CDR3 and VL CDR1, CDR2, and CDR3, wherein the VH CDR1, CDR2, and CDR3 and the VL CDR1, CDR2, and CDR3 are selected from the group consisting of VH CDR1s, VH CDR2s, and VH CDR3s and VL CDR1s, VL CDR2s, and VL CDR3s of the anti-FIX (BIIB-9) antibodies in FIG. 16A, FIG. 16B, FIG. 16C, and FIG. 16D; and, (ii) the anti-FX antibody, or antigen binding portion thereof, comprises VH CDR1, CDR2, and CDR3 and VL CDR1, CDR2, and CDR3, wherein the VH CDR1, CDR2, and CDR3 and the VL CDR1, CDR2, and CDR3 are selected from the group consisting of VH CDR1s, VH CDR2s, and VH CDR3s and VL CDR1s, VL CDR2s, and VL CDR3s of the anti-FX (BIIB-12) antibodies in FIG. 16A, FIG. 16B, FIG. 16C, and FIG. 16D. In some aspects of the bispecific molecule disclosed herein (a) the anti-FIX antibody, or antigen binding portion thereof, comprises (a1) VH CDR1, CDR2, and CDR3 sequences comprising SEQ ID NOs: 815, 860, or 905, respectively, and/or VL CDR1, VL CDR2, and VL CDR3 sequences comprising SEQ ID NOs: 950, 995, or 1040, respectively (BIIB-9-484); (a2) VH CDR1, CDR2, and CDR3 sequences comprising SEQ ID NOs: 822, 867, and 912, respectively, and/or VL CDR1, CDR2, and CDR3 sequences comprising SEQ ID NOs: 957, 1002, and 1047, respectively (BIIB-9-619); (a3) VH CDR1, CDR2, and CDR3 sequences comprising SEQ ID NOs: 1347, 1351, and 1355, respectively, and/or VL CDR1, CDR2, and CDR3 sequences comprising SEQ ID NOs: 1359, 1363, and 1367, respectively (BIIB-9-578); (a4) VH CDR1, CDR2, and CDR3 sequences comprising SEQ ID NOs: 843, 888, and 933, respectively, and/or VL CDR1, CDR2, and CDR3 sequences comprising SEQ ID NOs: 978, 1023, and 1068, respectively (BIIB-9-1335); or (a5) VH CDR1, CDR2, and CDR3 sequences comprising SEQ ID NOs: 844, 889, and 934, respectively, and/or VL CDR1, CDR2, and CDR3 sequences comprising SEQ ID NOs: 979, 1024, and 1069, respectively (BIIB-9-1336); and (b) the anti-FX antibody, or antigen binding portion thereof, comprises (b1) VH CDR1, CDR2, and CDR3 sequences comprising SEQ ID NOs: 1393, 1483, and 1573, respectively, and/or VL CDR1, CDR2, and CDR3 sequences comprising SEQ ID NOs: 1663, 1753, and 1843, respectively (BIIB-12-915); (b2) VH CDR1, CDR2, and CDR3 sequences comprising SEQ ID NOs: 1395, 1485, and 1575, respectively, and/or VL CDR1, CDR2, and CDR3 sequences comprising SEQ ID NOs: 1665, 1755, and 1845, respectively (BIIB-12-917); (b3) VH CDR1, CDR2, and CDR3 sequences comprising SEQ ID NOs: 1911, 1915, and 1919, respectively, and/or VL CDR1, CDR2, and CDR3 sequences comprising SEQ ID NOs: 1923, 1927, and 1931, respectively (BIIB-12-925); (b4) VH CDR1, CDR2, and CDR3 sequences comprising SEQ ID NOs: 1409, 1499, and 1589, respectively, and/or VL CDR1, CDR2, and CDR3 sequences comprising SEQ ID NOs: 1679, 1769, and 1859, respectively (BIIB-12-932); or (b5) VH CDR1, CDR2, and CDR3 sequences comprising SEQ ID NOs: 1433, 1523, and 1613, respectively, and/or VL CDR1, CDR2, and CDR3 sequences comprising SEQ ID NOs: 1703, 1793, and 1883, respectively (BIIB-12-1306). In some aspects of the bispecific molecule disclosed herein (a) the anti-FIX antibody, or antigen binding portion thereof, comprises (a1) a VH and a VL comprising SEQ ID NOs: 31 and 221, respectively (BIIB-9-484); (a2) a VH and a VL comprising SEQ ID NOs: 45 and 235, respectively (BIIB-9-619); (a3) a VH and a VL comprising SEQ ID NOs: 185 and 371, respectively (BIIB-9-578); (a4) a VH and a VL comprising SEQ ID NOs: 87 and 221, respectively (BIIB-9-1335); or (a5) a VH and a VL comprising SEQ ID NOs: 89 and 221, respectively (BIIB-9-1336); and, (b) the anti-FX antibody, or antigen binding portion thereof, comprises (b1) a VH and a VL comprising SEQ ID NOs: 423 and 611, respectively (BIIB-12-915); (b2) a VH and a VL comprising SEQ ID NOs: 427 and 615, respectively (BIIB-12-917); (b3) a VH and a VL comprising SEQ ID NOs: 559 and 747, respectively (BIIB-12-925); (b4) a VH and VL comprising SEQ ID NOs: 455 and 643, respectively (BIIB-12-932); or, (b5) a VH and a VL comprising SEQ ID NOs: 503 and 691, respectively (BIIB-12-1306). In some aspects of the bispecific molecule disclosed herein (i) the anti-FIX antibody, or antigen binding portion thereof, comprises a VH and a VL comprising SEQ ID NOs: 31 and 221, respectively (BIIB-9-484); and the anti-FX antibody, or antigen binding portion thereof, comprises a VH and a VL comprising SEQ ID NOs: 423 and 611, respectively (BIIB-12-915); or (ii) the anti-FIX antibody, or antigen binding portion thereof, comprises a VH and a VL comprising SEQ ID NOs: 31 and 221, respectively (BIIB-9-484); and the anti-FX antibody, or antigen binding portion thereof, comprises a VH and a VL comprising SEQ ID NOs: 427 and 615, respectively (BIIB-12-917); or (iii) the anti-FIX antibody, or antigen binding portion thereof, comprises a VH and a VL comprising SEQ ID NOs: 31 and 221, respectively (BIIB-9-484); and the anti-FX antibody, or antigen binding portion thereof, comprises a VH and a VL comprising SEQ ID NOs: 559 and 747, respectively (BIIB-12-925); or (iv) the anti-FIX antibody, or antigen binding portion thereof, comprises a VH and a VL comprising SEQ ID NOs: 31 and 221, respectively (BIIB-9-484); and the anti-FX antibody, or antigen binding portion thereof, comprises a VH and a VL comprising SEQ ID NOs: 455 and 643, respectively (BIIB-12-932); or, (v) the anti-FIX antibody, or antigen binding portion thereof, comprises a VH and a VL comprising SEQ ID NOs: 185 and 371, respectively (BIIB-9-578); and the anti-FX antibody, or antigen binding portion thereof, comprises a VH and a VL comprising SEQ ID NOs: 423 and 611, respectively (BIIB-12-915); or, (vi) the anti-FIX antibody, or antigen binding portion thereof, comprises a VH and a VL comprising SEQ ID NOs: 185 and 371, respectively (BIIB-9-578); and the anti-FX antibody, or antigen binding portion thereof, comprises a VH and a VL comprising SEQ ID NOs: 427 and 615, respectively (BIIB-12-917); or, (vii) the anti-FIX antibody, or antigen binding portion thereof, comprises a VH and a VL comprising SEQ ID NOs: 45 and 235, respectively (BIIB-9-619); and the anti-FX antibody, or antigen binding portion thereof, comprises a VH and a VL comprising SEQ ID NOs: 427 and 615, respectively (BIIB-12-917); or, (viii) the anti-FIX antibody, or antigen binding portion thereof, comprises a VH and a VL comprising SEQ ID NOs: 45 and 235, respectively (BIIB-9-619); and the anti-FX antibody, or antigen binding portion thereof, comprises a VH and a VL comprising SEQ ID NOs: 559 and 747, respectively (BIIB-12-925). In some aspects, the bispecific molecule functionally mimics activated factor VIII (FVIIIa) cofactor in at least one FVIIIa activity assay. In some aspects, the FVIIIa activity assay is selected from a chromogenic FXa generation assay, a one-stage clotting assay, or the combination thereof. In some aspects, the FVIIIa activity achieves at least 10%, 20%, 30%, 35%, 40%, 45% 50%, 60%, 70%, 80%, 90%, 100%, 110%, 120%, 130%, 140%, 150%, 160%, 170%, 180%, 190%, or 200% of the activity otherwise achieved by FVIII in the same assay. In some aspects, the bispecific molecule is capable of generating thrombin from prothrombin, fibrin from fibrinogen, and/or fibrin clot in vitro or in vivo. In some aspects, the bispecific molecule concurrently binds to both FIXa and FX, as determined by BLI. In some aspects, the bispecific molecule is of the IgG isotype. In some aspects, the IgG isotype is of the IgG1 subclass. In some aspects, the IgG isotype is of the IgG4 subclass. In some aspects, the bispecific molecule is of a bispecific IgG format and is selected from the group consisting of the antibodies in TABLE 2. In some aspects, the bispecific molecule is of a bispecific heterodimeric format. In some aspects, the bispecific molecule comprises two different heavy chains and two different light chains. In some aspects, the bispecific molecule comprises two identical light chains and two different heavy chains. In some aspects, the bispecific molecule is capable of controlling or reducing the incidence of bleeding episodes in a subject having hemophilia. In some aspects, the bispecific molecule is capable of maintaining homeostasis or in a subject having hemophilia. In some aspects, the bispecific molecule is capable of providing routine prophylaxis in a subject having hemophilia. In some aspects, the subject has developed or is expected to develop neutralizing antibodies against Factor VIII.

[0017] The present disclosure also provides an immunoconjugate comprising a bispecific molecule disclosed herein linked to an agent, e.g., a therapeutic agent. Also provided is a composition comprising (i) a bispecific molecule disclosed herein or an immunoconjugate comprising the bispecific molecule, and (ii) a carrier. Also provide is a kit comprising (i) a bispecific molecule disclosed herein or an immunoconjugate comprising the bispecific molecule, and (ii) instructions for use. Also provided is a nucleic acid sequence encoding the bispecific molecule disclosed herein. Also provided are a vector comprising the nucleic acid, and a host cell comprising the vector. In some aspects, the host cell is a prokaryotic cell, a eukaryotic cell, a protist cell, an animal cell, a plant cell, a fungal cell, a yeast cell, an Sf9 cell, a mammalian cell, an avian cell, an insect cell, a CHO cell, a HEK cell, or a COS cell. Also provided is a method of producing a bispecific molecule disclosed herein, comprising culturing a host cell disclosed herein under conditions that allow the expression of the bispecific molecule. In some aspects, the method of producing a bispecific molecule disclosed herein further comprises using conditions that enhance heterodimerization.

[0018] The present disclosure also provides a method of promoting FX activation in a subject in need thereof, comprising administering to the subject a therapeutically effective amount of a bispecific molecule disclosed herein, or an immunoconjugate, composition, nucleic acid, vector, or host cell disclosed herein which comprises or encodes a bispecific molecule disclosed herein.

[0019] The present disclosure also provides a method of reducing the frequency or degree of a bleeding episode in a subject in need thereof, comprising administering to the subject an effective amount of a bispecific molecule disclosed herein or an immunoconjugate, composition, nucleic acid, vector, or host cell disclosed herein which comprises or encodes a bispecific molecule disclosed herein. In some aspects, the subject has developed or has a tendency to develop an inhibitor against Factor VIII (“FVIII”). In some aspects, the inhibitor against FVIII is a neutralizing antibody against FVIII. In some aspects, the bleeding episode is the result of hemarthrosis, muscle bleed, oral bleed, hemorrhage, hemorrhage into muscles, oral hemorrhage, trauma, trauma capitis, gastrointestinal bleeding, intracranial hemorrhage, intra-abdominal hemorrhage, intrathoracic hemorrhage, bone fracture, central nervous system bleeding, bleeding in the retropharyngeal space, bleeding in the retroperitoneal space, bleeding in the illiopsoas sheath, or any combinations thereof.

[0020] The present disclosure also provides a method of treating a blood coagulation disorder in a subject in need thereof, comprising administering to the subject an effective amount of a bispecific molecule disclosed herein or an immunoconjugate, composition, nucleic acid, vector, or host cell disclosed herein which comprises or encodes a bispecific molecule disclosed herein. In some aspects, the blood coagulation disorder is hemophilia A or hemophilia B. In some aspects, the subject is a human subject. In some aspects, the subject is undergoing or has undergone FVIII replacement therapy. In some aspects, the bispecific molecule is administered in combination with a hemophilia therapy. In some aspects, the hemophilia therapy is a FVIII replacement therapy. In some aspects, the bispecific molecule, immunoconjugate, composition, nucleic acid, vector, or host cell is administered before, during or after administration of the hemophilia therapy. In some aspects, the bispecific molecule, immunoconjugate, composition, nucleic acid, vector, or host cell is administered intravenously or subcutaneously. In some aspects, administration of the bispecific molecule, immunoconjugate, composition, nucleic acid, vector, or host cell reduces the frequency of break-through bleeding episodes, spontaneous bleeding episodes, or acute bleeding. In some aspects, administration of the bispecific molecule, immunoconjugate, composition, nucleic acid, vector, or host cell reduces the annualized bleed rate by 5%, 10%, 20%, 30%, or 50%.

[0021] The present disclosure also provides an anti-FIXa antibody, or antigen binding portion thereof, which binds to the same epitope as BIIB-9-1336. Also provides is an anti-FIXa antibody, or antigen binding portion thereof, which binds to an epitope overlapping BIIB-9-1336 epitope.

[0022] The present disclosure also provides an anti-FIXa antibody, or antigen binding portion thereof, which binds to an epitope region comprising at least one amino acid located between chymotrypsinogen numbering positions (i) 91 and 101, (ii) 125 and 128, (iii) 165 and 179, or (iv) 232 and 241 in the sequence of the heavy chain of FIXa. Also provided is an anti-FIXa antibody, or antigen binding portion thereof, which binds to an epitope comprising at least one of chymotrypsinogen numbering amino acid residues H91, H92, N93, H101, D125, K126, E127, Y128, R165, Y177, N178, N179, S232, R233, Y234, V235, N236, W237, E240, and K241 of the sequence of the heavy chain of FIXa. In some aspects, the epitope comprises chymotrypsinogen numbering amino acid residues N93, R165, N178, and R233 of the sequence of the heavy chain of FIXa. In other aspects, the epitope comprises chymotrypsinogen numbering amino acid residues H91, H92, N93, H101, D125, K126, E127, Y128, R165, Y177, N178, N179, S232, R233, Y234, V235, N236, W237, E240, and K241 of the sequence of the heavy chain of FIXa. In some aspects, the epitope does not comprise at least one of chymotrypsinogen numbering amino acid residues N100, K132, Y137, R170, T172, F174, T175, H185, E202, and G205 of the sequence of the heavy chain of FIXa. In some aspects, the epitope does not comprise chymotrypsinogen numbering amino acid residues N100, K132, Y137, R170, T172, F174, T175, H185, E202, and G205 of the sequence of the heavy chain of FIXa. In some aspects, the anti-FIXa antibody, or antigen binding portion thereof, binds to at least one amino acid residue in the light chain of FIXa (SEQ ID NO:756). In some aspects, the amino acid residue in the light chain of FIXa (SEQ ID NO:756) is K100. In some aspects, the epitope overlaps the binding site of FVIIIa to FIXa. In some aspects, the anti-FIXa antibody, or antigen binding portion thereof, cross-competes with FVIIIa for binding to FIXa. In some aspects, the anti-FIXa antibody, or antigen binding portion thereof, blocks binding of FVIIIa to FIXa.

[0023] In some aspects, the anti-FIXa antibody, or antigen binding portion thereof, disclosed herein which specifically binds to FIXa, comprises VH CDR1, CDR2, and CDR3 and VL CDR1, CDR2, and CDR3, wherein (i) the VH CDR1 comprises a VH CDR1 selected from the group consisting of VH CDR1s in TABLE 7 or the VH CDR1 with one or two mutations; and/or, (ii) the VH CDR2 comprises a VH CDR2 selected from the group consisting of VH CDR2s in TABLE 7 or the VH CDR2 with one or two mutations; and/or, (iii) the VH CDR3 comprises a VH CDR3 selected from the group consisting of VH CDR3s in TABLE 7 or the VH CDR3 with one or two mutations; and/or, (iv) the VL CDR1 comprises a VL CDR1 selected from the group consisting of VL CDR1s in TABLE 7 or the VL CDR1 with one or two mutations; and/or, (v) the VL CDR2 comprises a VL CDR2 selected from the group consisting of VL CDR2s in TABLE 7 or the VL CDR2 with one or two mutations; and/or, (vi) the VL CDR3 comprises a VL CDR3 selected from the group consisting of VL CDR3s in TABLE 7 or the VL CDR3 with one or two mutations.

[0024] In some aspects, the anti-FIXa antibody, or antigen binding portion thereof, disclosed herein which specifically binds to FIXa, comprises VH CDR1, CDR2, and CDR3 and VL CDR1, CDR2, and CDR3, wherein the VH CDR3 comprises the amino acid sequence ARDXIGGYAGYYGMDV (SEQ ID NO: 2196), wherein X₁ is L or V. In some aspects, (i) the VH CDR1 comprises the amino acid sequence FTFX₁SX₂X₃MX₄ (SEQ ID NO: 2194), wherein X₁ is S, G or E, X₂ is Y or F, X₃ is S, E, G, or D, and X₄ is N, V, A, or T; and/or (ii) the VH CDR2 comprises the amino acid sequence X₅ISX₆X₇X₈X₉X₁₀IYYADSVKG (SEQ ID NO: 2195), wherein X₅ is S, A, Y, or G, X₆ is S or A, X₇ is S, A, or G, X₈ is S, G, or D, X₉ is S, T, or G, and X₁₀ is Y or T.

[0025] In some aspects, the anti-FIXa antibody, or antigen binding portion thereof, disclosed herein which specifically binds to FIXa, comprises VL CDR1, CDR2 and CDR3, wherein the VL CDR3 comprises the amino acid sequence QQYANFPYT (SEQ ID NO:2168). In some aspects, (i) the VL CDR1 comprises the amino acid sequence QASQDIANYLN (SEQ ID NO:2116); and/or, (ii) the VL CDR2 comprises the amino acid sequence DASNLET (SEQ ID NO:2142).

[0026] In some aspects, the anti-FIXa antibody, or antigen binding portion thereof, disclosed herein which specifically binds to FIXa, comprises (i) VH CDR1, CDR2, and CDR3, wherein VH CDR1 is selected from SEQ ID NOs: 2038 to 2047, VH CDR2 is selected from SEQ ID NOs: 2064 to 2073, and VH CDR3 is selected from SEQ ID NOs: 2090 to 2099, and/or (ii) VL CDR1, CDR2, and CDR3, wherein VL CDR1 is selected from SEQ ID NOs: 2116 to 2125, a VL CDR2 is selected from SEQ ID NOs: 2142 to 2151, and a VL CDR3 is selected from SEQ ID NOs: 2168 to 2177.

[0027] In some aspects, the anti-FIXa antibody, or antigen binding portion thereof, disclosed herein which specifically binds to FIXa, comprises VH CDR1, CDR2, and CDR3 and VL CDR1, CDR2, and CDR3, wherein the VH CDR3 comprises the amino acid sequence X₁RDVX₂GYAGX₃YGMDV (SEQ ID NO: 2198), wherein X₁ is A or V, X₂ is G or S, and X₃ is Y or F. In some aspects, (i) the VH CDR1 comprises the amino acid sequence FTFGSYDMN (SEQ ID NO: 2048); and/or (ii) the VH CDR2 comprises the amino acid sequence SISX₁X₂X₃SYIX₄YAX₅SVKG (SEQ ID NO: 2197), wherein X₁ is S or D, X₂ is G or S, X₃ is E or A, X₄ is Y or A, and X₅ is E or D.

[0028] In some aspects, the anti-FIXa antibody, or antigen binding portion thereof, disclosed herein which specifically binds to FIXa, comprises VH CDR1, CDR2, and CDR3 and VL CDR1, CDR2, and CDR3, wherein the VL CDR3 comprises the amino acid sequence X₁QYAX₂FPYT (SEQ ID NO: 2201), wherein X₁ is Q or S, and X₂ is N or R. In some aspects, the anti-FIXa antibody, or antigen binding portion thereof, disclosed herein which specifically binds to FIXa, comprises VL CDR1, CDR2 and CDR3, wherein (i) the VL CDR1 comprises the amino acid sequence X₁AX₂X₃X₄IX₅X₆YLN (SEQ ID NO: 2199), wherein X₁ is Q, G, or E, X₂ is S or N, X₃ is Q or E, X₄ is D or Y, X₅ is A or S, X₆ is N or D; and/or (ii) the VL CDR2 comprises the amino acid sequence DAX₇NLX₈X₉ (SEQ ID NO: 2200), wherein X₇ is S or A, X₈ is E, H or Q, and X₉ is T or Y.

[0029] In some aspects, the anti-FIXa antibody, or antigen binding portion thereof, disclosed herein which specifically binds to FIXa, comprises (i) VH CDR1, CDR2, and CDR3, wherein VH CDR1 is selected from SEQ ID NOs: 2048 to 2052, VH CDR2 is selected from SEQ ID NOs: 2074 to 2078, and VH CDR3 is selected from SEQ ID NOs: 2100 to 2104, and/or (ii) VL CDR1, CDR2, and CDR3 wherein VL CDR1 is selected from SEQ ID NOs: 2126 to 2130, VL CDR2 is selected from SEQ ID NOs: 2152 to 2156, and VL CDR3 is selected from SEQ ID NOs: 2178 to 2182.

[0030] In some aspects, the anti-FIXa antibody, or antigen binding portion thereof, disclosed herein which specifically binds to FIXa, comprises VH CDR1, CDR2, and CDR3 and VL CDR1, CDR2, and CDR3, wherein the VH CDR3 comprises the amino acid sequence ARDGPX₁X₂X₃DYYMDV (SEQ ID NO: 2204), wherein X₁ is R or Q, X₂ is V, D, L or E, and X₃ is S or V. In some aspects, the anti-FIXa antibody, or antigen binding portion thereof, disclosed herein which specifically binds to FIXa, comprises VH CDR1, CDR2 and CDR3, wherein (i) the VH CDR1 comprises the amino acid sequence YTFX₁X₂YX₃MH (SEQ ID NO: 2202), wherein X₁ is T or H, X₂ is S, G, or H, and X₃ is Y or P; and/or (ii) the VH CDR2 comprises the amino acid sequence X₄INPSX₅GX₆TX₇YAQKFQG (SEQ ID NO: 2203), wherein X₄ is I or S, X₅ is G or R, X₆ is S or R, and X₇ is S or E.

[0031] In some aspects, the anti-FIXa antibody, or antigen binding portion thereof, disclosed herein which specifically binds to FIXa, comprises VH CDR1, CDR2, and CDR3 and VL CDR1, CDR2, and CDR3, wherein the VL CDR3 comprises the amino acid sequence QQRDNWPFT (SEQ ID NO:2116). In some aspects, the anti-FIXa antibody, or antigen binding portion thereof, disclosed herein which specifically binds to FIXa, comprises VL CDR1, CDR2 and CDR3, wherein (i) the VL CDR1 comprises the amino acid sequence RASQSVSSYLA (SEQ ID NO:2116); and/or, (ii) the VL CDR2 comprises the amino acid sequence DASNRAT (SEQ ID NO:2116).

[0032] In some aspects, the anti-FIXa antibody, or antigen binding portion thereof, disclosed herein which specifically binds to FIXa, comprises (i) VH CDR1, CDR2, and CDR3, wherein VH CDR1 is selected from SEQ ID NOs: 2053 to 2057, VH CDR2 is selected from SEQ ID NOs: 2079 to 2083, and VH CDR3 is selected from SEQ ID NOs: 2105 to 2109, and/or (ii) VL CDR1, CDR2, and CDR3, wherein VL CDR1 is selected from SEQ ID NOs: 2131 to 2135, VL CDR2 is selected from SEQ ID NOs: 2157 to 2161, and VL CDR3 is selected from SEQ ID NOs: 2183 to 2187.

[0033] In some aspects, the anti-FIXa antibody, or antigen binding portion thereof, disclosed herein which specifically binds to FIXa, comprises VH CDR1, CDR2, and CDR3 and VL CDR1, CDR2, and CDR3, wherein the VH CDR3 comprises the amino acid sequence ARDKYQDYSX₁DI (SEQ ID NO: 2207), wherein X₁ is F or V. In some aspects, the anti-FIXa antibody, or antigen binding portion thereof, disclosed herein which specifically binds to FIXa, comprises VH CDR1, CDR2 and CDR3, wherein (i) the VH CDR1 comprises the amino acid sequence GSIX₁SX₂X₃YX₄WX₅(SEQ ID NO: 2205), wherein X₁ is S or A, X₂ is S, T, G, or V, X₃ is S or A, X₄ is Y or A, and X₅ is G, V, N, or S; and/or (ii) the VH CDR2 comprises the amino acid sequence X₆IX₇X₈X₉GX₁₀TX₁₁YNPSLKS (SEQ ID NO: 2206), wherein X₆ is S or Y, X₇ is S, Y, R, T or Q, X₈ is Y, G, P or A, X₉ is S or Q, X₁₀ is S or K, and X₁₁ is Y or Q.

[0034] In some aspects, the anti-FIXa antibody, or antigen binding portion thereof, disclosed herein which specifically binds to FIXa, comprises VL CDR1, CDR2 and CDR3, wherein the VL CDR3 comprises the amino acid sequence QQANFLPFT (SEQ ID NO:2188). In some aspects, the anti-FIXa antibody, or antigen binding portion thereof, disclosed herein which specifically binds to FIXa, comprises VL CDR1, CDR2 and CDR3, wherein (i) the VL CDR1 comprises the amino acid sequence RASQGIDSWLA (SEQ ID NO:2136); and/or, (ii) the VL CDR2 comprises the amino acid sequence AASSLQS (SEQ ID NO:2162).

[0035] In some aspects, the anti-FIXa antibody, or antigen binding portion thereof, disclosed herein which specifically binds to FIXa, comprises (i) VH CDR1, CDR2, and CDR3, wherein VH CDR1 is selected from SEQ ID NOs: 2058 to 2063, VH CDR2 is selected from SEQ ID NOs: 2084 to 2089, and VH CDR3 is selected from SEQ ID NOs: 2110 to 2115, and/or (ii) VL CDR1, CDR2, and CDR3, wherein VL CDR1 is selected from SEQ ID NOs: 2136 to 2141, VL CDR2 is selected from SEQ ID NOs: 2162 to 2167, and VL CDR3 is selected from SEQ ID NOs: 2188 to 2193.

[0036] In some aspects, the anti-FIXa antibody, or antigen binding portion thereof, disclosed herein which specifically binds to FIXa, comprises a VH and a VL, wherein (i) the VH comprises an amino acid sequence which is at least about 80%, at least about 85%, at least about 90%, at least about 95%, at least about 96%, at least about 97%, at least about 98%, at least about 99%, or about 100% identical to the amino acid sequence selected from the group consisting of SEQ ID NOs: 1935, 1939, 1943, 1947, 1951, 1955, 1959, 1963, 1967, 1971, 1975, 1979, 1983, 1987, 1991, 1995, 1999, 2003, 2007, 2011, 2015, 2019, 2023, 2027, 2031, and 2035; and/or (ii) the VL comprises an amino acid sequence which is at least about 80%, at least about 85%, at least about 90%, at least about 95%, at least about 96%, at least about 97%, at least about 98%, at least about 99%, or about 100% identical to the amino acid sequence selected from the group consisting of SEQ ID NOs: 1937, 1941, 1945, 1949, 1953, 1957, 1961, 1965, 1969, 1973, 1977, 1981, 1985, 1989, 1993, 1997, 2001, 2005, 2009, 2013, 2017, 2021, 2025, 2029, 2033, and 2037.

[0037] In some aspects, the anti-FIXa antibody, or antigen binding portion thereof, disclosed herein which specifically binds to FIXa, comprises a VH and a VL, wherein (a1) the VH and the VL comprise SEQ ID NOs: 1935 and 1937, respectively (BIIB-9-3595); (a2) the VH and the VL comprise SEQ ID NOs: 1939 and 1941, respectively (BIIB-9-3601); (a3) the VH and the VL comprise SEQ ID NOs: 1943 and 1945, respectively (BIIB-9-3604); (a4) the VH and the VL comprise SEQ ID NOs: 1947 and 1949, respectively (BIIB-9-3617); (a5) the VH and the VL comprise SEQ ID NOs: 1951 and 1953, respectively (BIIB-9-3618); (a6) the VH and the VL comprise SEQ ID NOs: 1955 and 1957, respectively (BIIB-9-3621); (a7) the VH and the VL comprise SEQ ID NOs: 1959 and 1961, respectively (BIIB-9-3647); (a8) the VH and the VL comprise SEQ ID NOs: 1963 and 1965, respectively (BIIB-9-3649); (a9) the VH and the VL comprise SEQ ID NOs: 1967 and 1969, respectively (BIIB-9-3650); (a10) the VH and the VL comprise SEQ ID NOs: 1971 and 1973, respectively (BIIB-9-3654); (a11) the VH and the VL comprise SEQ ID NOs: 1975 and 1977, respectively (BIIB-9-3753); (a12) the VH and the VL comprise SEQ ID NOs: 1979 and 1981, respectively (BIIB-9-3754); (a13) the VH and the VL comprise SEQ ID NOs: 1983 and 1985, respectively (BIIB-9-3756); (a14) the VH and the VL comprise SEQ ID NOs: 1987 and 1989, respectively (BIIB-9-3764); (a15) the VH and the VL comprise SEQ ID NOs: 1991 and 1993, respectively (BIIB-9-3766); (a16) the VH and the VL comprise SEQ ID NOs: 1995 and 1997, respectively (BIIB-9-3707); (a17) the VH and the VL comprise SEQ ID NOs: 1999 and 2001, respectively (BIIB-9-3709); (a18) the VH and the VL comprise SEQ ID NOs: 2003 and 2005, respectively (BIIB-9-3720); (a19) the VH and the VL comprise SEQ ID NOs: 2007 and 2009, respectively (BIIB-9-3727); (a20) the VH and the VL comprise SEQ ID NOs: 2011 and 2013, respectively (BIIB-9-3745); (a21) the VH and the VL comprise SEQ ID NOs: 2015 and 2017, respectively (BIIB-9-3780); (a22) the VH and the VL comprise SEQ ID NOs: 2019 and 2021, respectively (BIIB-9-3675); (a23) the VH and the VL comprise SEQ ID NOs: 2023 and 2025, respectively (BIIB-9-3681); (a24) the VH and the VL comprise SEQ ID NOs: 2027 and 2029, respectively (BIIB-9-3684); (a25) the VH and the VL comprise SEQ ID NOs: 2031 and 2033, respectively (BIIB-9-3698); or, (a26) the VH and the VL comprise SEQ ID NOs: 2035 and 2037, respectively (BIIB-9-3704).

### EMBODIMENTS

[0038] Embodiment 1. An isolated antibody, or an antigen binding portion thereof, that specifically binds to activated factor IX (FIXa) (“anti-FIXa antibody or antigen binding portion thereof”), wherein the anti-FIXa antibody or antigen binding portion thereof preferentially binds to FIXa in the presence of FIXa and factor IX zymogen (FIXz).

[0039] Embodiment 2. The anti-FIXa antibody, or antigen binding portion thereof, of embodiment 1, which binds to FIXa with a binding affinity higher than a binding affinity of the anti-FIXa antibody or antigen binding portion thereof to FIXz.

[0040] Embodiment 3. An isolated anti-FIXa antibody, or antigen binding portion thereof, which binds to FIXa with a binding affinity higher than a binding affinity of the anti-FIXa antibody or antigen binding portion thereof to FIXz.

[0041] Embodiment 4. The anti-FIXa antibody, or antigen binding portion thereof, of any preceding embodiments, which binds to FIXa with a K_{D} of about 100 nM or less, about 90 nM or less, about 80 nM or less, about 70 nM or less, about 60 nM or less, about 50 nM or less, about 40 nM or less, about 30 nM or less, about 20 nM or less, about 10 nM or less, about 1 nM or less as determined by a Bio-Layer Interferometry (BLI) assay.

[0042] Embodiment 5. The anti-FIXa antibody, or antigen binding portion thereof, of any preceding embodiments, wherein the FIXa is free FIXa, FIXa in a tenase complex, or FIXa covalently linked to EGR-CMK (FIXa-SM).

[0043] Embodiment 6. The anti-FIXa antibody, or antigen binding portion thereof, of any preceding embodiments, wherein the FIXz comprises non-activatable Factor IX (FIXn).

[0044] Embodiment 7. The anti-FIXa antibody, or antigen binding portion thereof, of any preceding embodiments, which cross-competes with a reference antibody selected from the group consisting of the antibodies in FIG. 3A, FIG. 3B, and FIG. 3C.

[0045] Embodiment 8. The anti-FIXa antibody, or antigen binding portion thereof, of any preceding embodiments, which binds to the same epitope as a reference antibody selected from the group consisting of the antibodies in FIG. 3A, FIG. 3B, and FIG. 3C.

[0046] Embodiment 9. The anti-FIXa antibody, or antigen binding portion thereof, of embodiment 7 or 8, wherein the reference antibody is selected from BIIB-9-484, BIIB-9-440, BIIB-9-882, BIIB-9-460, BIIB-9-433, and any combination thereof.

[0047] Embodiment 10. The anti-FIXa antibody, or antigen binding portion thereof, of any preceding embodiments, which preferentially binds to FIXa-SM compared to free FIXa or FIXz and/or binds to FIXa-SM with a binding affinity higher than a binding affinity of the anti-FIXa antibody or antigen binding portion thereof to free FIXa or FIXz.

[0048] Embodiment 11. The anti-FIXa antibody, or antigen binding portion thereof, of any preceding embodiments, which cross-competes with a reference antibody selected from the group consisting of the antibodies in FIG. 3A.

[0049] Embodiment 12. The anti-FIXa antibody, or antigen binding portion thereof, of any preceding embodiments, which binds to the same epitope as a reference antibody selected from the group consisting of the antibodies in FIG. 3A.

[0050] Embodiment 13. The anti-FIXa antibody, or antigen binding portion thereof, of embodiment 11 or 12, wherein the reference antibody is selected from BIIB-9-484, BIIB-9-440, BIIB-9-460, and any combination thereof.

[0051] Embodiment 14. The anti-FIXa antibody, or antigen binding portion thereof, of any preceding embodiments, which preferentially binds to free FIXa compared to FIXa-SM or FIXz and/or binds to free FIXa with a binding affinity higher than a binding affinity of the anti-FIXa antibody or antigen binding portion thereof to FIXa-SM or FIXz.

[0052] Embodiment 15. The anti-FIXa antibody, or antigen binding portion thereof, of any preceding embodiments, which cross-competes with a reference antibody selected from the group consisting of the antibodies in FIG. 3B.

[0053] Embodiment 16. The anti-FIXa antibody, or antigen binding portion thereof, of any preceding embodiments, which binds to the same epitope as a reference antibody selected from the group consisting of the antibodies in FIG. 3B.

[0054] Embodiment 17. The anti-FIXa antibody, or antigen binding portion thereof, of any preceding embodiments, which preferentially binds to free FIXa or FIXa-SM compared to FIXz and/or binds to free FIXa or FIXa-SM with a binding affinity higher than a binding affinity of the anti-FIXa antibody or antigen binding portion thereof to FIXz.

[0055] Embodiment 18. The anti-FIXa antibody, or antigen binding portion thereof, of any preceding embodiments, which cross-competes with a reference antibody selected from the group consisting of the antibodies in FIG. 3C. 19. Embodiment The anti-FIXa antibody, or antigen binding portion thereof, of any preceding embodiments, which binds to the same epitope as a reference antibody selected from the group consisting of the antibodies in FIG. 3C.

[0056] Embodiment 20. The anti-FIXa antibody, or antigen binding portion thereof, of embodiment 18 or 19, wherein the reference antibody is selected from BIIB-9-882, BIIB-9-433, and the combination thereof.

[0057] 21. The anti-FIXa antibody, or antigen binding portion thereof, of any preceding embodiments, which comprises CDR1, CDR2, and CDR3, wherein the CDR3 comprises a VH CDR3 selected from the group consisting of VH CDR3s in FIG. 3A, FIG. 3B, and FIG. 3C or the VH CDR3 with one or two mutations.

[0058] Embodiment 22. The anti-FIXa antibody, or antigen binding portion thereof, of any one of embodiments 1 to 21, which comprises CDR1, CDR2, and CDR3, wherein the CDR3 comprises ARDX₁X₂X₃X₄X₅X₆YYX₇MDV (SEQ ID NO:753), wherein X₁ is V or G, X₂ is G or V, X₃ is G or R, X₄ is Y or V, X₅ is A or S, X₆ is G or D, X₇ is G or none.

[0059] Embodiment 23. The anti-FIXa antibody, or antigen binding portion thereof, of embodiment 22, wherein the CDR3 comprises ARDVGGYAGYYGMDV (SEQ ID NO: 905, BIIB-9-484, 1335, 1336), ARDISTDGESSLYYYMDV (SEQ ID NO: 901, BIIB-9-460), ARGPTDSSGYLDMDV (SEQ ID NO: 1186, BIIB-9-882), or ARDGPRVSDYY MDV (SEQ ID NO: 912, BIIB-9-619).

[0060] Embodiment 24. The anti-FIXa antibody, or antigen binding portion thereof, of any preceding embodiments, which comprises CDR1, CDR2, and CDR3, wherein the CDR1 comprises a VH CDR1 selected from the group consisting of VH CDR1s in FIG. 3A, FIG. 3B, and FIG. 3C or the VH CDR1 with one or two mutations.

[0061] Embodiment 25. The anti-FIXa antibody, or antigen binding portion thereof, of any preceding embodiments, which comprises VH CDR1, CDR2, and CDR3, wherein the CDR2 comprises a VH CDR2 selected from the group consisting of VH CDR2s in FIG. 3A, FIG. 3B, and FIG. 3C or the VH CDR2 with one or two mutations.

[0062] Embodiment 26. The anti-FIXa antibody, or antigen binding portion thereof, of any preceding embodiments, which comprises VL CDR1, CDR2, and CDR3, wherein the CDR1 comprises a VL CDR1 selected from the group consisting of VL CDR1s in FIG. 3A, FIG. 3B, and FIG. 3C or the VL CDR1 with one or two mutations.

[0063] Embodiment 27. The anti-FIXa antibody, or antigen binding portion thereof, of any preceding embodiments, which comprises VL CDR1, CDR2, and CDR3, wherein the CDR2 comprises a VL CDR2 selected from the group consisting of VL CDR2s in FIG. 3A, FIG. 3B, and FIG. 3C or the VL CDR2 with one or two mutations.

[0064] Embodiment 28. The anti-FIXa antibody, or antigen binding portion thereof, of any preceding embodiments, which comprises VL CDR1, CDR2, and CDR3, wherein the CDR3 comprises a VL CDR3 selected from the group consisting of VL CDR3s in FIG. 3A, FIG. 3B, and FIG. 3C or the VL CDR3 with one or two mutations.

[0065] Embodiment 29. An isolated anti-FIXa antibody, or antigen binding portion thereof, which specifically binds to FIXa, comprising VH CDR1, CDR2, and CDR3 and VL CDR1, CDR2, and CDR3, wherein the VH CDR1, CDR2, and CDR3 and the VL CDR1, CDR2, and CDR3 comprise VH CDR1, VH CDR2, and VH CDR3 and VL CDR1, CDR2, and CDR3 of FIG. 3A, FIG. 3B, and FIG. 3C, respectively.

[0066] Embodiment 30. The anti-FIXa antibody, or antigen binding portion thereof, of embodiment 29, wherein the anti-FIXa antibody or antigen binding portion thereof comprises VH CDR1, CDR2, and CDR3 sequences comprising SEQ ID NOs: 815, 860, and 905, respectively, and/or VL CDR1, CDR2, and CDR3 sequences comprising SEQ ID NOs: 950, 995, and 1040, respectively (BIIB-9-484).

[0067] Embodiment 31. The anti-FIXa antibody, or antigen binding portion thereof, of embodiment 29, wherein (a1) the antibody comprises VH CDR1, CDR2, and CDR3 sequences comprising SEQ ID NO: 809, SEQ ID NO: 854, and SEQ ID NO: 899, respectively, and/or VL CDR1, VL CDR2, and VL CDR3 sequences comprising SEQ ID NO: 944, SEQ ID NO: 989, and SEQ ID NO: 1034, respectively (BIIB-9-440); (a2) the antibody comprises VH CDR1, CDR2, and CDR3 sequences comprising SEQ ID NO: 1102, SEQ ID NO: 1144, and SEQ ID NO: 1186, respectively, and/or VL CDR1, VL CDR2, and VL CDR3 sequences comprising SEQ ID NO: 1228, SEQ ID NO: 1270, and SEQ ID NO: 1312, respectively (BIIB-9-882); (a3) the antibody comprises VH CDR1, CDR2, and CDR3 sequences comprising SEQ ID NO: 811, SEQ ID NO: 856, and SEQ ID NO: 901, respectively, and/or VL CDR1, VL CDR2, and VL CDR3 sequences comprising SEQ ID NO: 946, SEQ ID NO: 991, and SEQ ID NO: 1036, respectively (BIIB-9-460); or, (a4) the antibody comprises VH CDR1, CDR2, and CDR3 sequences comprising SEQ ID NO: 1108, SEQ ID NO: 1150, and SEQ ID NO: 1192, respectively, and/or VL CDR1, VL CDR2, and VL CDR3 sequences comprising SEQ ID NO: 1234, SEQ ID NO: 1276, and SEQ ID NO: 1318, respectively (BIIB-9-433).

[0068] Embodiment 32. The anti-FIXa antibody, or antigen binding portion thereof, of embodiment 29, wherein the antibody comprises VH CDR1, CDR2, and CDR3 sequences comprising SEQ ID NO: 822, SEQ ID NO: 867, and SEQ ID NO: 912, respectively, and/or VL CDR1, VL CDR2, and VL CDR3 sequences comprising SEQ ID NO: 957, SEQ ID NO: 1002, and SEQ ID NO: 1047, respectively (BIIB-9-619).

[0069] Embodiment 33. The anti-FIXa antibody, or antigen binding portion thereof, of embodiment 29, wherein (i) the antibody comprises VH CDR1, CDR2, and CDR3 sequences comprising SEQ ID NO: 843, SEQ ID NO: 888, and SEQ ID NO: 933, respectively, and/or VL CDR1, VL CDR2, and VL CDR3 sequences comprising SEQ ID NO: 950, SEQ ID NO: 995, and SEQ ID NO: 1040, respectively, respectively or (ii) the antibody comprises VH CDR1, CDR2, and CDR3 sequences comprising SEQ ID NO: 844, SEQ ID NO: 889, and SEQ ID NO: 934, respectively, and/or VL CDR1, VL CDR2, and VL CDR3 sequences comprising SEQ ID NO: 950, SEQ ID NO: 995, and SEQ ID NO: 1040, respectively (BIIB-9-1335 and BIIB-9-1336).

[0070] Embodiment 34. The anti-FIXa antibody, or antigen binding portion thereof, of any preceding embodiments, comprising VH and VL, wherein the VH comprises an amino acid sequence which is at least about 80%, at least about 85%, at least about 90%, at least about 95%, at least about 96%, at least about 97%, at least about 98%, at least about 99%, or about 100% identical to the amino acid sequence selected from the group consisting of SEQ ID NOs: 1, 3, 5, 7, 9, 11, 13, 15, 17, 19, 21, 23, 25, 27, 29, 31, 33, 35, 37, 39, 41, 43, 45, 47, 49, 51, 53, 55, 57, 59, 61, 63, 65, 67, 69, 71, 73, 75, 77, 79, 81, 83, 85, 87, 89, 91, 93, 95, 97, 99, 101, 103, 105, 107, 109, 111, 113, 115, 117, 119, 121, 123, 125, 127, 129, 131, 133, 135, 137, 139, 141, 143, 145, 147, 149, 151, 153, 155, 157, 159, 161, 163, 165, 167, 169, 171, 173, 175, 177, 179, and 181.

[0071] Embodiment 35. The anti-FIXa antibody, or antigen binding portion thereof of any preceding embodiments, comprising VH and VL, wherein the VL comprises an amino acid sequence which is at least about 80%, at least about 85%, at least about 90%, at least about 95%, at least about 96%, at least about 97%, at least about 98%, at least about 99%, or about 100% identical to the amino acid sequence selected from the group consisting of SEQ ID NOs: 191, 193, 195, 197, 199, 201, 203, 205, 207, 209, 211, 213, 215, 217, 219, 221, 223, 225, 227, 229, 231, 233, 235, 237, 239, 241, 243, 245, 247, 249, 251, 253, 255, 257, 259, 261, 263, 265, 267, 269, 271, 273, 275, 277, 279, 281, 283, 285, 287, 289, 291, 293, 295, 297, 299, 301, 303, 305, 307, 309, 311, 313, 315, 317, 319, 321, 323, 325, 327, 329, 331, 333, 335, 337, 339, 341, 343, 345, 347, 349, 351, 353, 355, 357, 359, 361, 363, 365, and 367.

[0072] Embodiment 36. The anti-FIXa antibody, or antigen binding portion thereof of any preceding embodiments, which comprises a VH and a VL, wherein the VH is derived from a germline sequence of VH1-46.0, VH1-46.4, VH1-46.5, VH1-46.7, VH1-46.9, VH1-69.9, VH3-07.0, VH3-21.0, VH3-21.2, VH3-23.0, VH3-23.1, VH4-31.0, VH4-34.0, VH4-39.0, VH4-39.2, VH4-39.3, VH4-39.5, VH4-39.6, VH4-39.8, VH4-59.6, VH4-0B.4, or VH4-0B.6.

[0073] Embodiment 37. The anti-FIXa antibody, or antigen binding portion thereof of any preceding embodiments, which comprises a VH and a VL, wherein the VL is derived from a germline sequence of VK1-05.0, VK1-05.6, VK1-05.9, VK1-05.21, VK1-12.0, VK1-12.3, VK1-33.0, VK1-33.1, VK1-33.2, VK1-33.8, VK1-33.10, VK1-39.0, VK1-39.6, VK2-28.0, VK2-28.1, VK3-11.0, VK3-11.2, VK3-11.6, VK3-11.10, VK3-11.14, VK3-15.0, VK3-15.6, VK3-15.8, VK3-15.11, VK3-15.20, VK3-15.26, VK3-20.0, VK3-20.4, VK3-20.5, VK3-20.8, or VK4-01.0.

[0074] Embodiment 38. The anti-FIXa antibody, or antigen binding portion thereof of any preceding embodiments, comprising VH and VL, wherein (a1) VH and VL comprise SEQ ID NOs: 31 and 221, respectively (BIIB-9-484); (a2) VH and VL comprise SEQ ID NOs: 19 and 209, respectively (BIIB-9-440); (a3) VH and VL comprise SEQ ID NOs: 115 and 301, respectively (BIIB-9-882); (a4) VH and VL comprise SEQ ID NOs: 23 and 213, respectively (BIIB-9-460); (a5) VH and VL comprise SEQ ID NOs: 127 and 313, respectively (BIIB-9-433); (a6) VH and VL comprise SEQ ID NOs: 45 and 235, respectively (BIIB-9-619); (a7) VH and VL comprise SEQ ID NOs: 185 and 371, respectively (BIIB-9-578); (a8) VH and VL comprise SEQ ID NOs: 87 and 221, respectively (BIIB-9-1335); or, (a9) VH and VL comprise SEQ ID NOs: 89 and 221, respectively (BIIB-9-1336).

[0075] Embodiment 39. An isolated antibody, or an antigen binding portion thereof, which specifically binds to FIXz (“anti-FIXz antibody or antigen binding portion thereof”), wherein the anti-FIXz antibody or antigen binding portion thereof preferentially binds to FIXz in the presence of free FIXa or FIXa-SM and/or the anti-FIXz antibody or antigen binding portion thereof binds to FIXz with a binding affinity higher than a binding affinity of the anti-FIXz antibody or antigen binding portion thereof to free FIXa or FIXa-SM.

[0076] Embodiment 40. The anti-FIXz antibody, or antigen binding portion thereof, of any preceding embodiments, which cross-competes with a reference antibody selected from the group consisting of the antibodies in FIG. 3D.

[0077] Embodiment 41. The anti-FIXz antibody, or antigen binding portion thereof, of any preceding embodiments, which binds to the same epitope as a reference antibody selected from the group consisting of the antibodies in FIG. 3D.

[0078] Embodiment 42. The anti-FIXz antibody, or antigen binding portion thereof, of embodiment 40 or 41, wherein the reference antibody is BIIB-9-578.

[0079] Embodiment 43. The anti-FIXz antibody, or antigen binding portion thereof, of any preceding embodiments, which comprises CDR1, CDR2, and CDR3, wherein the CDR3 comprises a VH CDR3 selected from the group consisting of VH CDR3s in FIG. 3D or the VH CDR3 with one or two mutations.

[0080] Embodiment 44. The anti-FIXz antibody, or antigen binding portion thereof, of embodiment 43, wherein the CDR3 comprises ARDKYQDYSFDI (SEQ ID NO: 1355, BIIB-9-578).

[0081] Embodiment 45. The anti-FIXz antibody, or antigen binding portion thereof, of any preceding embodiments, which comprises CDR1, CDR2, and CDR3, wherein the CDR1 comprises a VH CDR1 selected from the group consisting of VH CDR1s in FIG. 3D or the VH CDR1 with one or two mutations.

[0082] Embodiment 46. The anti-FIXz antibody, or antigen binding portion thereof, of any preceding embodiments, which comprises VH CDR1, CDR2, and CDR3, wherein the CDR2 comprises a VH CDR2 selected from the group consisting of VH CDR2s in FIG. 3D or the VH CDR2 with one or two mutations.

[0083] Embodiment 47. The anti-FIXz antibody, or antigen binding portion thereof, of any preceding embodiments, which comprises VL CDR1, CDR2, and CDR3, wherein the CDR1 comprises a VL CDR1 selected from the group consisting of VL CDR1s in FIG. 3D or the VL CDR1 with one or two mutations.

[0084] Embodiment 48. The anti-FIXz antibody, or antigen binding portion thereof, of any preceding embodiments, which comprises VL CDR1, CDR2, and CDR3, wherein the CDR2 comprises a VL CDR2 selected from the group consisting of VL CDR2s in FIG. 3D or the VL CDR2 with one or two mutations.

[0085] Embodiment 49. The anti-FIXz antibody, or antigen binding portion thereof, of any preceding embodiments, which comprises VL CDR1, CDR2, and CDR3, wherein the CDR3 comprises a VL CDR3 selected from the group consisting of VL CDR3s in FIG. 3D or the VL CDR3 with one or two mutations.

[0086] Embodiment 50. The anti-FIX antibody, or antigen binding portion thereof, of any one of the preceding embodiments and embodiments 169 to 204, wherein the antibody is selected from the group consisting of an IgG1, an IgG2, an IgG3, an IgG4 or a variant thereof.

[0087] Embodiment 51. The anti-FIX antibody, or antigen binding portion thereof, of embodiment 50, wherein the antibody is an IgG4 antibody.

[0088] Embodiment 52. The anti-FIX antibody, or antigen binding portion thereof, of embodiment 50, wherein the antibody comprises an effectorless IgG4 Fc.

[0089] Embodiment 53. The anti-FIX antibody, or antigen binding portion thereof, of any one of the preceding embodiments and embodiments 169 to 204, comprises a heavy chain constant region.

[0090] Embodiment 54. The anti-FIX antibody of any one of the preceding embodiments and embodiments 169 to 204, wherein the antibody is a human antibody, an engineered antibody, or a humanized antibody.

[0091] Embodiment 55. The anti-FIX antigen binding portion thereof of any one of the preceding embodiments and embodiments 169 to 204, wherein the antigen binding portion thereof comprises an Fab, Fab′, F(ab′)2, Fv, or a single chain Fv (scFv).

[0092] Embodiment 56. A bispecific molecule comprising the anti-FIX antibody or antigen binding portion thereof of any one of the preceding embodiments and embodiments 169 to 204 linked to a molecule having a second binding specificity.

[0093] Embodiment 57. A nucleic acid encoding the heavy and/or light chain variable region of the anti-FIX antibody, or antigen binding portion thereof, of any one of embodiments 1-55 and embodiments 169 to 204 or the bispecific molecule of embodiment 56.

[0094] Embodiment 58. An expression vector comprising the nucleic acid molecule of embodiment 57.

[0095] Embodiment 59. A cell transformed with an expression vector of embodiment 58.

[0096] Embodiment 60. An immunoconjugate comprising the antibody or antigen binding portion thereof according to any one of embodiments 1 to 55 and embodiments 169 to 204 or the bispecific molecule of embodiment 56, linked to an agent.

[0097] Embodiment 61. A composition comprising the antibody, or antigen binding portion thereof of any one of embodiment 1 to 55 and embodiments 169 to 204, the bispecific molecule of embodiment 56, or the immunoconjugate of embodiment 60, and a carrier.

[0098] Embodiment 62. A kit comprising the antibody, or antigen binding portion thereof of any one of embodiments 1 to 55 and embodiments 169 to 204, the bispecific molecule of embodiment 56, or the immunoconjugate, of embodiment 60 and instructions for use.

[0099] Embodiment 63. A method of preparing an anti-FIX antibody, or antigen binding portion thereof, comprising expressing the antibody, or antigen binding portion thereof, in the cell of embodiment 59 and isolating the antibody, or antigen binding portion thereof, from the cell.

[0100] Embodiment 64. A method of measuring a level of activated FIX in a subject in need thereof comprising contacting the anti-FIXa antibody, or antigen binding portion thereof of any one of embodiments 1 to 55 and embodiments 169 to 204, with a sample obtained from the subject under suitable conditions and measuring the binding of the anti-FIXa antibody or antigen binding portion thereof to FIXa in the sample.

[0101] Embodiment 65. The method of embodiment 64, wherein the sample is blood or serum.

[0102] Embodiment 66. An isolated antibody, or an antigen binding portion thereof, that specifically binds to factor X zymogen (FXz) (“anti-FXz antibody or antigen binding portion thereof”), wherein the anti-FXz antibody or antigen binding portion thereof preferentially binds to FXz in the presence of FXz and activated factor X (FXa).

[0103] Embodiment 67. The anti-FXz antibody, or antigen binding portion thereof, of embodiment 66, which binds to FXz with a binding affinity higher than a binding affinity of the antibody or antigen binding portion thereof to FXa.

[0104] Embodiment 68. An isolated anti-FXz antibody, or antigen binding portion thereof, which binds to FXz with a binding affinity higher than a binding affinity of the antibody or antigen binding portion thereof to FXa.

[0105] Embodiment 69. The anti-FXz antibody, or antigen binding portion thereof, of any one of embodiments 66 to 68, which binds to FXz with a KD of about 100 nM or less, about 90 nM or less, about 80 nM or less, about 70 nM or less, about 60 nM or less, about 50 nM or less, about 40 nM or less, about 30 nM or less, about 20 nM or less, about 10 nM or less, about 1 nM or less as measured by BLI.

[0106] Embodiment 70. The anti-FXz antibody, or antigen binding portion thereof, of any one of embodiments 66 to 69, wherein the FXa is free FXa or FXa covalently linked to EGR-CMK (FIXa-SM).

[0107] Embodiment 71. The anti-FXz antibody, or antigen binding portion thereof, of any one of embodiments 66 to 70, wherein the FXz comprises non-activatable Factor X (FXn).

[0108] Embodiment 72. The anti-FXz antibody, or antigen binding portion thereof, of any one of embodiments 66 to 71, which cross-competes with a reference antibody selected from the group consisting of the antibodies in FIG. 12A and FIG. 12B.

[0109] Embodiment 73. The anti-FXz antibody, or antigen binding portion thereof, of any one of embodiments 66 to 72, which binds to the same epitope as a reference antibody selected from the group consisting of the antibodies in FIG. 12A and FIG. 12B.

[0110] Embodiment 74. The anti-FXz antibody, or antigen binding portion thereof, of embodiment 73, which binds to the same epitope as a reference antibody selected from the group consisting of BIIB-12-915, BIIB-12-917, BIIB-12-932, and any combination thereof.

[0111] Embodiment 75. The anti-FXz antibody, or antigen binding portion thereof, of any one of embodiments 66 to 74, which comprises CDR1, CDR2, and CDR3, wherein the CDR3 comprises a VH CDR3 selected from the group consisting of VH CDR3s in FIG. 12A and FIG. 12B or the VH CDR3 with one or two mutations.

[0112] Embodiment 76. The anti-FXz antibody, or antigen binding portion thereof, of any one of embodiments 66 to 75, which comprises CDR1, CDR2, and CDR3, wherein the CDR3 comprises ARX₁X₂X₃RX₄X₅X₆X₇FDX₈ (SEQ ID NO: 766), wherein X₁ is G or L, X₂ is R or G, X₃ is F or Y, X₄ is P or G, X₅ is R or A, X₆ is G or S, X₇ is R or A, and X₈ is Y or I.

[0113] Embodiment 77. The anti-FXz antibody, or antigen binding portion thereof, of any one of embodiments 66 to 76, which comprises CDR1, CDR2, and CDR3, wherein the CDR3 comprises ARGRFRPRGRFDY (SEQ ID NO: 1575, BIIB-12-917), ARLGYRGASAFDI (SEQ ID NO: 1589, BIIB-12-932), or ARVGGGYANP (SEQ ID NO: 1573, BIIB-12-915).

[0114] Embodiment 78. The anti-FXz antibody, or antigen binding portion thereof, of any one of embodiments 66 to 77, which comprises VH CDR1, CDR2, and CDR3, wherein the CDR1 comprises a VH CDR1 selected from the group consisting of VH CDR1s in FIG. 12A and FIG. 12B or the VH CDR1 with one or two mutations.

[0115] Embodiment 79. The anti-FXz antibody, or antigen binding portion thereof, of any one of embodiments 66 to 78, which comprises VH CDR1, CDR2, and CDR3, wherein the CDR2 comprises a VH CDR2 selected from the group consisting of VH CDR2s in FIG. 12A and FIG. 12B or the VH CDR2 with one or two mutations.

[0116] Embodiment 80. The anti-FXz antibody, or antigen binding portion thereof, of any one of embodiments 66 to 79, which comprises VL CDR1, CDR2, and CDR3, wherein the CDR1 comprises a VL CDR1 selected from the group consisting of VL CDR1s in FIG. 12A and FIG. 12B or the VL CDR1 with one or two mutations.

[0117] Embodiment 81. The anti-FXz antibody, or antigen binding portion thereof, of any one of embodiments 66 to 80, which comprises VL CDR1, CDR2, and CDR3, wherein the CDR2 comprises a VL CDR2 selected from the group consisting of VL CDR2s in FIG. 12A and FIG. 12B or the VL CDR2 with one or two mutations.

[0118] Embodiment 82. The anti-FXz antibody, or antigen binding portion thereof, of any one of embodiments 66 to 81, which comprises VL CDR1, CDR2, and CDR3, wherein the CDR3 comprises a VL CDR3 selected from the group consisting of VL CDR3s in FIG. 12A and FIG. 12B or the VL CDR3 with one or two mutations.

[0119] Embodiment 83. An isolated antibody, or antigen binding portion thereof, which specifically binds to FXz, comprising VH CDR1, CDR2, and CDR3 and VL CDR1, CDR2, and CDR3, wherein the VH CDR1, CDR2, and CDR3 and VL CDR1, CDR2, and CDR3 comprise VH CDR1, CDR2, and CDR3 and VL CDR1, CDR2, and CDR3 of FIG. 12A and FIG. 12B, respectively.

[0120] Embodiment 84. The anti-FXz antibody, or antigen binding portion thereof, of embodiment 83, wherein the antibody comprises VH CDR1, CDR2, and CDR3 sequences comprising SEQ ID NOs: 1393, 1483, or 1573, respectively, and/or VL CDR1, VL CDR2, and VL CDR3 sequences comprising SEQ ID NOs: 1663, 1753, or 1843, respectively (BIIB-12-915).

[0121] Embodiment 85. The anti-FXz antibody, or antigen binding portion thereof, of embodiment 83, wherein the antibody comprises VH CDR1, CDR2, and CDR3 sequences comprising SEQ ID NOs: 1395, 1485, or 1575, respectively, and/or VL CDR1, VL CDR2, and VL CDR3 sequences comprising SEQ ID NOs: 1665, 1755, or 1845, respectively (BIIB-12-917).

[0122] Embodiment 86. The anti-FXz antibody, or antigen binding portion thereof, of embodiment 83, wherein the antibody comprises VH CDR1, CDR2, and CDR3 sequences comprising SEQ ID NOs: 1409, 1499, or 1589, respectively, and/or VL CDR1, VL CDR2, and VL CDR3 sequences comprising SEQ ID NOs: 1679, 1769, or 1859, respectively (BIIB-12-932).

[0123] Embodiment 87. The anti-FXz antibody, or antigen binding portion thereof, of any one of embodiments 66 to 86, comprising VH and VL, wherein the VH comprises an amino acid sequence which is at least about 80%, at least about 85%, at least about 90%, at least about 95%, at least about 96%, at least about 97%, at least about 98%, at least about 99%, or about 100% identical to the amino acid sequence selected from the group consisting of SEQ ID NOs: 377, 379, 381, 383, 385, 387, 389, 391, 393, 395, 397, 399, 401, 403, 405, 407, 409, 411, 413, 415, 417, 419, 421, 423, 425, 427, 429, 431, 433, 435, 437, 439, 441, 443, 445, 447, 449, 451, 453, 455, 457, 459, 461, 463, 465, 467, 469, 471, 473, 475, 477, 479, 481, 483, 485, 487, 489, 491, 493, 495,497, 499, 501, 503, 505, 507, 509, 511, 513, 515, 517, 519, 521, 523, 525, 527, 529, 531, 533, 535, 537, 539, 541, 543, 545, 547, 549, 551, 553, and 555.

[0124] Embodiment 88. The anti-FXz antibody, or antigen binding portion thereof of any one of embodiments 66 to 87, comprising VH and VL, wherein the VL comprises an amino acid sequence which is at least about 80%, at least about 85%, at least about 90%, at least about 95%, at least about 96%, at least about 97%, at least about 98%, at least about 99%, or about 100% identical to the amino acid sequence selected from the group consisting of SEQ ID NOs: 565, 567, 569, 571, 573, 575, 579, 581, 583, 585, 587, 589, 591, 593, 595, 597, 599, 601, 603, 605, 607, 609, 611, 613, 615, 617, 619, 621, 623, 625, 627, 629, 631, 633, 635, 637, 639, 641, 643, 645, 647, 649, 651, 653, 655, 657, 659, 661, 663, 665, 667, 669, 671, 673, 675, 677, 679, 681, 683, 685, 687, 689, 691, 693, 695, 697, 699, 701, 703, 705, 707, 709, 711, 713, 715, 717, 719, 721, 723, 725, 727, 729, 731, 733, 735, 737, 739, 741, and 743.

[0125] Embodiment 89. The anti-FXz antibody, or antigen binding portion thereof, of any one of embodiments 66 to 88, which comprises a VH and a VL, wherein the VH is derived from a germline sequence of VH1-18.0, VH1-18.1, VH1-18.8, VH1-46.0, VH1-46.4, VH1-46.5, VH1-46.6, VH1-46.7, VH1-46.8, VH1-46.9, VH3-21.0, VH3-23.0, VH3-23.2, VH3-23.6, VH3-30.0, VH4-31.5, VH4-39.0, VH4-39.5. VH4-0B.4, or VH5-51.1.

[0126] Embodiment 90. The anti-FXz antibody, or antigen binding portion thereof, of any one of embodiments 66 to 89, which comprises a VH and a VL, wherein the VL is derived from a germline sequence of VK1-05.6, VK1-05.12, VK1-12.0, VK1-12.4, VK1-12.7, VK1-12.10, VK1-12.15, VK1-39.0, VK1-39.3, VK1-39.15, VK2-28.0, VK2-28.1, VK2-28.5, VK3-11.0, VK3-11.2, VK3-11.6, VK3-11.14, VK3-15.0, VK3-15.8, VK3-15.10, VK3-20.0, VK3-20.1, VK3-20.4, VK3-20.5, VK4-01.0, VK4-01.4, VK4-01.20.

[0127] Embodiment 91. The anti-FXz antibody, or antigen binding portion thereof, of any one of embodiments 66 to 90, comprising VH and VL, wherein

(b1) VH and VL comprise SEQ ID NOs: 423 and 611, respectively (BIIB-12-915);
(b2) VH and VL comprise SEQ ID NOs: 427 and 615, respectively (BIIB-12-917); or,
(b3) VH and VL comprise SEQ ID NOs: 455 and 643, respectively (BIIB-12-932).

[0128] Embodiment 92. An isolated antibody, or an antigen binding portion thereof, that specifically binds to activated factor X (FXa) (“anti-FXa antibody or antigen binding portion thereof”), wherein the anti-FXa antibody or antigen binding portion thereof preferentially binds to FXa in the presence of FXz and FXa and/or binds to FXa with a binding affinity higher than a binding affinity of the antibody or antigen binding portion thereof to FXz.

[0129] Embodiment 93. The anti-FXa antibody, or antigen binding portion thereof, of embodiment 92, which cross-competes with a reference antibody selected from the group consisting of the antibodies in FIG. 12C.

[0130] Embodiment 94. The anti-FXa antibody, or antigen binding portion thereof, of embodiment 92 or 93, which binds to the same epitope as a reference antibody selected from the group consisting of the antibodies in FIG. 12C.

[0131] Embodiment 95. The anti-FXa antibody, or antigen binding portion thereof, of embodiment 94, which binds to the same epitope as a reference antibody selected from the group consisting of BIIB-12-925.

[0132] Embodiment 96. The anti-FXa antibody, or antigen binding portion thereof, of any one of embodiments 92 to 95, which comprises CDR1, CDR2, and CDR3, wherein the CDR3 comprises a VH CDR3 selected from the group consisting of VH CDR3s in FIG. 12C or the VH CDR3 with one or two mutations.

[0133] Embodiment 97. The anti-FXa antibody, or antigen binding portion thereof, of any one of embodiments 92 to 96, which comprises CDR1, CDR2, and CDR3, wherein the CDR3 comprises AKGPRYYWYSWYFDL (SEQ ID NO: 1919, BIIB-12-925).

[0134] Embodiment 98. The anti-FXa antibody, or antigen binding portion thereof, of any one of embodiments 92 to 97, which comprises VH CDR1, CDR2, and CDR3, wherein the CDR1 comprises a VH CDR1 selected from the group consisting of VH CDR1s in FIG. 12C or the VH CDR1 with one or two mutations.

[0135] Embodiment 99. The anti-FXa antibody, or antigen binding portion thereof, of any one of embodiments 92 to 98, which comprises VH CDR1, CDR2, and CDR3, wherein the CDR2 comprises a VH CDR2 selected from the group consisting of VH CDR2s in FIG. 12C or the VH CDR2 with one or two mutations.

[0136] Embodiment 100. The anti-FXa antibody, or antigen binding portion thereof, of any one of embodiments 92 to 99, which comprises VL CDR1, CDR2, and CDR3, wherein the CDR1 comprises a VL CDR1 selected from the group consisting of VL CDR1s in FIG. 12C or the VL CDR1 with one or two mutations.

[0137] Embodiment 101. The anti-FXa antibody, or antigen binding portion thereof, of any one of embodiments 92 to 100, which comprises VL CDR1, CDR2, and CDR3, wherein the CDR2 comprises a VL CDR2 selected from the group consisting of VL CDR2s in FIG. 12C or the VL CDR2 with one or two mutations.

[0138] Embodiment 102. The anti-FXa antibody, or antigen binding portion thereof, of any one of embodiments 92 to 101, which comprises VL CDR1, CDR2, and CDR3, wherein the CDR3 comprises a VL CDR3 selected from the group consisting of VL CDR3s in FIG. 12C or the VL CDR3 with one or two mutations.

[0139] Embodiment 103. An isolated antibody, or antigen binding portion thereof, which specifically binds to FXa, comprising VH CDR1, CDR2, and CDR3 and VL CDR1, CDR2, and CDR3, wherein the VH CDR1, CDR2, and CDR3 and VL CDR1, CDR2, and CDR3 comprise VH CDR1, CDR2, and CDR3 and VL CDR1, CDR2, and CDR3 of FIG. 12C, respectively.

[0140] Embodiment 104. The anti-FXa antibody, or antigen binding portion thereof, of embodiment 103, wherein the antibody comprises VH CDR1, CDR2, and CDR3 sequences comprising SEQ ID NOs: 1911, 1915, or 1919, respectively, and/or VL CDR1, VL CDR2, and VL CDR3 sequences comprising SEQ ID NOs: 1923, 1927, or 1931, respectively (BIIB-12-925).

[0141] Embodiment 105. The anti-FXa antibody, or antigen binding portion thereof, of any one of embodiments 92 to 104, comprising VH and VL, wherein the VH and VL comprise SEQ ID NOs: 559 and 747, respectively (BIIB-12-925).

[0142] Embodiment 106. The anti-FX antibody, or antigen binding portion thereof, of any one of embodiments 66 to 105, wherein the antibody is selected from the group consisting of an IgG1, an IgG2, an IgG3, an IgG4 or a variant thereof.

[0143] Embodiment 107. The anti-FX antibody, or antigen binding portion thereof, of embodiment 106, wherein the antibody is an IgG4 antibody.

[0144] Embodiment 108. The anti-FX antibody, or antigen binding portion thereof, of embodiment 106, wherein the antibody comprises an effectorless IgG4 Fc.

[0145] Embodiment 109. The anti-FX antibody, or antigen binding portion thereof, of any one of embodiments 66 to 108, which comprises a heavy chain constant region.

[0146] Embodiment 110. The anti-FX antibody of any one of embodiments 66 to 109, wherein the antibody is a human antibody, an engineered antibody, or a humanized antibody.

[0147] Embodiment 111. The anti-FX antigen binding portion thereof of any one of embodiments 66 to 110, wherein the antigen binding portion thereof comprises an Fab, Fab′, F(ab′)2, Fv, or a single chain Fv (scFv).

[0148] Embodiment 112. A bispecific molecule comprising the anti-FX antibody of any one of embodiments 66 to 111 linked to a molecule having a second binding specificity.

[0149] Embodiment 113. A nucleic acid encoding the heavy and/or light chain variable region of the antibody, or antigen binding portion thereof, of any one of embodiments 66-111 or the bispecific molecule of embodiment 112.

[0150] Embodiment 114. An expression vector comprising the nucleic acid molecule of embodiment 113.

[0151] Embodiment 115. A cell transformed with an expression vector of embodiment 114.

[0152] Embodiment 116. An immunoconjugate comprising the antibody, or antigen binding portion thereof, of any one of embodiments 66-111 or the bispecific molecule of embodiment 112, linked to an agent.

[0153] Embodiment 117. A composition comprising the antibody, or antigen binding portion thereof, of any one of embodiments 66-111 or the bispecific molecule of embodiment 112, or the immunoconjugate of embodiment 116, and a carrier.

[0154] Embodiment 118. A kit comprising the antibody, or antigen binding portion thereof, of any one of embodiments 66-111 or the bispecific molecule of embodiment 112, or the immunoconjugate of embodiment 116, and instructions for use.

[0155] Embodiment 119. A method of preparing an anti-FX antibody, or antigen binding portion thereof, comprising expressing the antibody, or antigen binding portion thereof, in the cell of embodiment 115 and isolating the antibody, or antigen binding portion thereof, from the cell.

[0156] Embodiment 120. A method of measuring zymogen FX (FXz) in a subject in need thereof comprising contacting the anti-FX antibody, or antigen binding portion thereof, of any one of embodiments 66 to 111 with a sample obtained from the subject under suitable conditions and measuring the binding of the anti-FX antibody or antigen binding portion thereof to FXz in the sample.

[0157] Embodiment 121. The method of embodiment 120, wherein the sample is blood or serum from the subject.

[0158] Embodiment 122. A bispecific molecule comprising the anti-FIX antibody, or antigen binding portion thereof, of any one of embodiments 1 to 55 and embodiments 169 to 204 and (ii) the anti-FX antibody, or antigen binding portion thereof, of any one of embodiments 66 to 111.

[0159] Embodiment 123. The bispecific molecule of embodiment 122, which cross-competes with a reference bispecific antibody, wherein the reference bispecific antibody comprises a VH and a VL of an anti-FIX antibody selected from the group consisting of the anti-FIX antibodies in FIG. 3A, FIG. 3B, FIG. 3C, and FIG. 3D and a VH and a VL of an anti-FX antibody selected from the group consisting of the anti-FX antibodies in FIG. 12A, FIG. 12B, and FIG. 12C.

[0160] Embodiment 124. The bispecific molecule of embodiment 122 or 123, which binds to the same epitope as a reference bispecific antibody, wherein the reference bispecific antibody comprises a VH and a VL of an anti-FIX antibody selected from the group consisting of the anti-FIX antibodies in FIG. 3A, FIG. 3B, FIG. 3C, and FIG. 3D and a VH and a VL of an anti-FX antibody selected from the group consisting of the anti-FX antibodies in FIG. 12A, FIG. 12B, and FIG. 12C.

[0161] Embodiment 125. The bispecific molecule of any one of embodiments 122 to 124, wherein (i) the anti-FIX antibody, or antigen binding portion thereof, comprises VH CDR1, CDR2, and CDR3 and VL CDR1, CDR2, and CDR3, wherein the VH CDR1, CDR2, and CDR3 and the VL CDR1, CDR2, and CDR3 are selected from the group consisting of VH CDR1s, VH CDR2s, and VH CDR3s and VL CDR1s, VL CDR2s, and VL CDR3s of the anti-FIX (BIIB-9) antibodies in FIG. 16A, FIG. 16B, FIG. 16C, and FIG. 16D; and (ii) the anti-FX antibody, or antigen binding portion thereof, comprises VH CDR1, CDR2, and CDR3 and VL CDR1, CDR2, and CDR3, wherein the VH CDR1, CDR2, and CDR3 and the VL CDR1, CDR2, and CDR3 are selected from the group consisting of VH CDR1s, VH CDR2s, and VH CDR3s and VL CDR1s, VL CDR2s, and VL CDR3s of the anti-FX (BIIB-12) antibodies in FIG. 16A, FIG. 16B, FIG. 16C, and FIG. 16D.

[0162] Embodiment 126. The bispecific molecule of any one of embodiments 122 to 124, wherein (a) the anti-FIX antibody, or antigen binding portion thereof, comprises:

[0163] (a1) VH CDR1, CDR2, and CDR3 sequences comprising SEQ ID NOs: 815, 860, or 905, respectively, and/or VL CDR1, VL CDR2, and VL CDR3 sequences comprising SEQ ID NOs: 950, 995, or 1040, respectively (BIIB-9-484);

[0164] (a2) VH CDR1, CDR2, and CDR3 sequences comprising SEQ ID NOs: 822, 867, and 912, respectively, and/or VL CDR1, CDR2, and CDR3 sequences comprising SEQ ID NOs: 957, 1002, and 1047, respectively (BIIB-9-619);

[0165] (a3) VH CDR1, CDR2, and CDR3 sequences comprising SEQ ID NOs: 1347, 1351, and 1355, respectively, and/or VL CDR1, CDR2, and CDR3 sequences comprising SEQ ID NOs: 1359, 1363, and 1367, respectively (BIIB-9-578);

[0166] (a4) VH CDR1, CDR2, and CDR3 sequences comprising SEQ ID NOs: 843, 888, and 933, respectively, and/or VL CDR1, CDR2, and CDR3 sequences comprising SEQ ID NOs: 978, 1023, and 1068, respectively (BIIB-9-1335); or,

[0167] (a5) VH CDR1, CDR2, and CDR3 sequences comprising SEQ ID NOs: 844, 889, and 934, respectively, and/or VL CDR1, CDR2, and CDR3 sequences comprising SEQ ID NOs: 979, 1024, and 1069, respectively (BIIB-9-1336); and,

[0168] (b) the anti-FX antibody, or antigen binding portion thereof, comprises:

[0169] (b1) VH CDR1, CDR2, and CDR3 sequences comprising SEQ ID NOs: 1393, 1483, and 1573, respectively, and/or VL CDR1, CDR2, and CDR3 sequences comprising SEQ ID NOs: 1663, 1753, and 1843, respectively (BIIB-12-915);

[0170] (b2) VH CDR1, CDR2, and CDR3 sequences comprising SEQ ID NOs: 1395, 1485, and 1575, respectively, and/or VL CDR1, CDR2, and CDR3 sequences comprising SEQ ID NOs: 1665, 1755, and 1845, respectively (BIIB-12-917);

[0171] (b3) VH CDR1, CDR2, and CDR3 sequences comprising SEQ ID NOs: 1911, 1915, and 1919, respectively, and/or VL CDR1, CDR2, and CDR3 sequences comprising SEQ ID NOs: 1923, 1927, and 1931, respectively (BIIB-12-925);

[0172] (b4) VH CDR1, CDR2, and CDR3 sequences comprising SEQ ID NOs: 1409, 1499, and 1589, respectively, and/or VL CDR1, CDR2, and CDR3 sequences comprising SEQ ID NOs: 1679, 1769, and 1859, respectively (BIIB-12-932); or,

[0173] (b5) VH CDR1, CDR2, and CDR3 sequences comprising SEQ ID NOs: 1433, 1523, and 1613, respectively, and/or VL CDR1, CDR2, and CDR3 sequences comprising SEQ ID NOs: 1703, 1793, and 1883, respectively (BIIB-12-1306).

[0174] Embodiment 127. The bispecific molecule of any one of embodiments 122 to 124, wherein (a) the anti-FIX antibody, or antigen binding portion thereof, comprises:

[0175] (a1) a VH and a VL comprising SEQ ID NOs: 31 and 221, respectively (BIIB-9-484);

[0176] (a2) a VH and a VL comprising SEQ ID NOs: 45 and 235, respectively (BIIB-9-619);

[0177] (a3) a VH and a VL comprising SEQ ID NOs: 185 and 371, respectively (BIIB-9-578);

[0178] (a4) a VH and a VL comprising SEQ ID NOs: 87 and 221, respectively (BIIB-9-1335); or

[0179] (a5) a VH and a VL comprising SEQ ID NOs: 89 and 221, respectively (BIIB-9-1336); and, (b) the anti-FX antibody, or antigen binding portion thereof, comprises:

[0180] (b1) a VH and a VL comprising SEQ ID NOs: 423 and 611, respectively (BIIB-12-915);

[0181] (b2) a VH and a VL comprising SEQ ID NOs: 427 and 615, respectively (BIIB-12-917);

[0182] (b3) a VH and a VL comprising SEQ ID NOs: 559 and 747, respectively (BIIB-12-925);

[0183] (b4) a VH and VL comprising SEQ ID NOs: 455 and 643, respectively (BIIB-12-932); or,

[0184] (b5) a VH and a VL comprising SEQ ID NOs: 503 and 691, respectively (BIIB-12-1306).

[0185] Embodiment 128. The bispecific molecule of any one of embodiments 122 to 127, (i) wherein the anti-FIX antibody, or antigen binding portion thereof, comprises a VH and a VL comprising SEQ ID NOs: 31 and 221, respectively; (BIIB-9-484) and the anti-FX antibody, or antigen binding portion thereof, comprises a VH and a VL comprising SEQ ID NOs: 423 and 611, respectively (BIIB-12-915); (ii) wherein the anti-FIX antibody, or antigen binding portion thereof, comprises a VH and a VL comprising SEQ ID NOs: 31 and 221, respectively; (BIIB-9-484) and the anti-FX antibody, or antigen binding portion thereof, comprises a VH and a VL comprising SEQ ID NOs: 427 and 615, respectively (BIIB-12-917); (iii) wherein the anti-FIX antibody, or antigen binding portion thereof, comprises a VH and a VL comprising SEQ ID NOs: 31 and 221, respectively; (BIIB-9-484) and the anti-FX antibody, or antigen binding portion thereof, comprises a VH and a VL comprising SEQ ID NOs: 559 and 747, respectively (BIIB-12-925); (iv) wherein the anti-FIX antibody, or antigen binding portion thereof, comprises a VH and a VL comprising SEQ ID NOs: 31 and 221, respectively; (BIIB-9-484) and the anti-FX antibody, or antigen binding portion thereof, comprises a VH and a VL comprising SEQ ID NOs: 455 and 643, respectively (BIIB-12-932); (v) wherein the anti-FIX antibody, or antigen binding portion thereof, comprises a VH and a VL comprising SEQ ID NOs: 185 and 371, respectively; (BIIB-9-578) and the anti-FX antibody, or antigen binding portion thereof, comprises a VH and a VL comprising SEQ ID NOs: 423 and 611, respectively (BIIB-12-915); (vi) wherein the anti-FIX antibody, or antigen binding portion thereof, comprises a VH and a VL comprising SEQ ID NOs: 185 and 371, respectively; (BIIB-9-578) and the anti-FX antibody, or antigen binding portion thereof, comprises a VH and a VL comprising SEQ ID NOs: 427 and 615, respectively (BIIB-12-917); (vii) wherein the anti-FIX antibody, or antigen binding portion thereof, comprises a VH and a VL comprising SEQ ID NOs: 45 and 235, respectively; (BIIB-9-619) and the anti-FX antibody, or antigen binding portion thereof, comprises a VH and a VL comprising SEQ ID NOs: 427 and 615, respectively (BIIB-12-917); or, (viii) wherein the anti-FIX antibody, or antigen binding portion thereof, comprises a VH and a VL comprising SEQ ID NOs: 45 and 235, respectively; (BIIB-9-619) and the anti-FX antibody, or antigen binding portion thereof, comprises a VH and a VL comprising SEQ ID NOs: 559 and 747, respectively (BIIB-12-925).

[0186] Embodiment 129. The bispecific molecule of any one of embodiments 122 to 128, which functionally mimics activated factor VIII (FVIIIa) cofactor in at least one FVIIIa activity assay.

[0187] Embodiment 130. The bispecific molecule of embodiment 129, wherein the FVIIIa activity assay is selected from a chromogenic FXa generation assay, a one-stage clotting assay, or the combination thereof.

[0188] Embodiment 131. The bispecific molecule of embodiment 129 or 130, wherein the FVIIIa activity achieves at least 10%, 20%, 30%, 35%, 40%, 45% 50%, 60%, 70%, 80%, 90%, 100%, 110%, 120%, 130%, 140%, 150%, 160%, 170%, 180%, 190%, or 200% of the activity otherwise achieved by FVIII in the same assay.

[0189] Embodiment 132. The bispecific molecule of any one of embodiments 122 to 131, wherein the bispecific molecule is capable of generating thrombin from prothrombin, fibrin from fibrinogen, and/or fibrin clot in vitro or in vivo.

[0190] Embodiment 133. The bispecific molecule according to any one of embodiments 122 through 132, wherein the bispecific molecule concurrently binds to both FIXa and FX, as determined by BLI.

[0191] Embodiment 134. The bispecific molecule of any one of embodiments 122 to 133, wherein the bispecific molecule is of the IgG isotype.

[0192] Embodiment 135. The bispecific molecule of embodiment 134, wherein the IgG isotype is of the IgG1 subclass.

[0193] Embodiment 136. The bispecific molecule of embodiment 134, wherein the IgG isotype is of the IgG4 subclass.

[0194] Embodiment 137. The bispecific molecule of any one of embodiments 122 to 136, wherein the bispecific molecule is of a bispecific IgG format and is selected from the group consisting of the antibodies in TABLE 2.

[0195] Embodiment 138. The bispecific molecule of embodiment 137, wherein the bispecific molecule is of a bispecific heterodimeric format.

[0196] Embodiment 139. The bispecific molecule of any one of embodiments 122 to 138, wherein the bispecific molecule comprises two different heavy chains and two different light chains.

[0197] Embodiment 140. The bispecific molecule according to any one of embodiments 122 through 138, wherein the bispecific molecule comprises two identical light chains and two different heavy chains.

[0198] Embodiment 141. The bispecific molecule of any one of embodiments 122 to 140, wherein the bispecific molecule is capable of controlling or reducing the incidence of bleeding episodes in a subject having hemophilia.

[0199] Embodiment 142. The bispecific molecule of any one of embodiments 122 to 140, wherein the bispecific molecule is capable of maintaining homeostasis or in a subject having hemophilia.

[0200] Embodiment 143. The bispecific molecule of any one of embodiments 122 to 140, wherein the bispecific molecule is capable of providing routine prophylaxis in a subject having hemophilia.

[0201] Embodiment 144. The bispecific molecule of any one of embodiments 122 to 143, wherein the subject has developed or is expected to develop neutralizing antibodies against Factor VIII.

[0202] Embodiment 145. An immunoconjugate comprising the bispecific molecule of any one of embodiments 122 to 144, linked to an agent.

[0203] Embodiment 146. A composition comprising the bispecific molecule of any one of embodiments 122 to 144 or the immunoconjugate, of embodiment 145, and a carrier.

[0204] Embodiment 147. A kit comprising the bispecific molecule of any one of embodiments 122 to 144 or the immunoconjugate of embodiment 145 and instructions for use.

[0205] Embodiment 148. A nucleic acid sequence encoding the bispecific molecule of any one of embodiments 122 to 144.

[0206] Embodiment 149. A vector comprising the nucleic acid according to embodiment 148.

[0207] Embodiment 150. A host cell comprising the vector of embodiment 149.

[0208] Embodiment 151. The host cell of embodiment 150, wherein the host cell is a prokaryotic cell, a eukaryotic cell, a protist cell, an animal cell, a plant cell, a fungal cell, a yeast cell, an Sf9 cell, a mammalian cell, an avian cell, an insect cell, a CHO cell, a HEK cell, or a COS cell.

[0209] Embodiment 152. A method of producing a bispecific molecule, comprising culturing the host cell of embodiment 150 under conditions that allow the expression of the bispecific molecule.

[0210] Embodiment 153. The method of producing the bispecific molecule of any one of embodiments 122 to 144, further comprising conditions that enhance heterodimerization.

[0211] Embodiment 154. A method of promoting FX activation in a subject in need thereof, comprising administering to the subject a therapeutically effective amount of the bispecific molecule of any one of embodiments 122 through 144, the immunoconjugate of embodiment 145, the composition of embodiment 146, the nucleic acid of embodiment 148, the vector of embodiment 149, or the host cell of embodiment 150.

[0212] Embodiment 155. A method of reducing the frequency or degree of a bleeding episode in a subject in need thereof, comprising administering to the subject an effective amount of the bispecific molecule of any one of embodiments 122 through 144, the immunoconjugate of embodiment 145, the composition of embodiment 146, the nucleic acid of embodiment 148, the vector of embodiment 149, or the host cell of embodiment 150.

[0213] Embodiment 156. The method of embodiment 155, wherein the subject has developed or has a tendency to develop an inhibitor against Factor VIII (“FVIII”).

[0214] Embodiment 157. The method of embodiment 156, wherein the inhibitor against FVIII is a neutralizing antibody against FVIII.

[0215] Embodiment 158. The method of any one of embodiments 155 to 157, wherein the bleeding episode is the result of hemarthrosis, muscle bleed, oral bleed, hemorrhage, hemorrhage into muscles, oral hemorrhage, trauma, trauma capitis, gastrointestinal bleeding, intracranial hemorrhage, intra-abdominal hemorrhage, intrathoracic hemorrhage, bone fracture, central nervous system bleeding, bleeding in the retropharyngeal space, bleeding in the retroperitoneal space, bleeding in the illiopsoas sheath, or any combinations thereof.

[0216] Embodiment 159. A method of treating a blood coagulation disorder in a subject in need thereof, comprising administering to the subject an effective amount of the bispecific molecule of any one of embodiments 122 through 144, the immunoconjugate of embodiment 145, the composition of embodiment 146, the nucleic acid of embodiment 148, the vector of embodiment 149, or the host cell of embodiment 150.

[0217] Embodiment 160. The method of embodiment 159, wherein the blood coagulation disorder is hemophilia A or hemophilia B.

[0218] Embodiment 161. The method of any one of embodiments 154 to 160, wherein the subject is a human subject.

[0219] Embodiment 162. The method of any one of embodiments 154 to 160, wherein the subject is undergoing or has undergone FVIII replacement therapy.

[0220] Embodiment 163. The method of any one of embodiments 154 through 162, wherein the bispecific molecule is administered in combination with a hemophilia therapy.

[0221] Embodiment 164. The method of embodiment 163, wherein the hemophilia therapy is a FVIII replacement therapy.

[0222] Embodiment 165. The method of embodiment 163 or 164, wherein the bispecific molecule is administered before, during or after administration of the hemophilia therapy.

[0223] Embodiment 166. The method of any one of embodiments 154 through 165, wherein the bispecific molecule is administered intravenously or subcutaneously.

[0224] Embodiment 167. The method of any one of embodiments 154 through 166, wherein administration of the bispecific molecule reduces the frequency of break-through bleeding episodes, spontaneous bleeding episodes, or acute bleeding.

[0225] Embodiment 168. The method of embodiment 167, wherein administration of the bispecific molecule reduces the annualized bleed rate by 5%, 10%, 20%, 30%, or 50%.

[0226] Embodiment 169. An anti-FIXa antibody, or antigen binding portion thereof, which binds to the same epitope as BIIB-9-1336.

[0227] Embodiment 170. An anti-FIXa antibody, or antigen binding portion thereof, which binds to an epitope overlapping BIIB-9-1336 epitope.

[0228] Embodiment 171. An anti-FIXa antibody, or antigen binding portion thereof, which binds to an epitope region comprising at least one amino acid located between chymotrypsinogen numbering positions (i) 91 and 101, (ii) 125 and 128, (iii) 165 and 179, or (iv) 232 and 241 in the sequence of the heavy chain of FIXa.

[0229] Embodiment 172. An anti-FIXa antibody, or antigen binding portion thereof, which binds to an epitope comprising at least one of chymotrypsinogen numbering amino acid residues H91, H92, N93, H101, D125, K126, E127, Y128, R165, Y177, N178, N179, S232, R233, Y234, V235, N236, W237, E240, and K241 of the sequence of the heavy chain of FIXa.

[0230] Embodiment 173. The anti-FIXa antibody, or antigen binding portion thereof, of embodiment 171 or 172, wherein the epitope comprises chymotrypsinogen numbering amino acid residues N93, R165, N178, and R233 of the sequence of the heavy chain of FIXa.

[0231] Embodiment 174. The anti-FIXa antibody, or antigen binding portion thereof, of embodiments 171 to 173 wherein the epitope comprises chymotrypsinogen numbering amino acid residues H91, H92, N93, H101, D125, K126, E127, Y128, R165, Y177, N178, N179, S232, R233, Y234, V235, N236, W237, E240, and K241 of the sequence of the heavy chain of FIXa.

[0232] Embodiment 175. The anti-FIXa antibody, or antigen binding portion thereof, of embodiments 171 to 174, wherein the epitope does not comprise at least one of chymotrypsinogen numbering amino acid residues N100, K132, Y137, R170, T172, F174, T175, H185, E202, and G205 of the sequence of the heavy chain of FIXa.

[0233] Embodiment 176. The anti-FIXa antibody, or antigen binding portion thereof, of embodiments 171 to 175, wherein the epitope does not comprise chymotrypsinogen numbering amino acid residues N100, K132, Y137, R170, T172, F174, T175, H185, E202, and G205 of the sequence of the heavy chain of FIXa.

[0234] Embodiment 177. The anti-FIXa antibody, or antigen binding portion thereof, of embodiments 171 to 176, which binds to at least one amino acid residue in the light chain of FIXa (SEQ ID NO:756).

[0235] Embodiment 178. The anti-FIXa antibody, or antigen binding portion thereof, of embodiment 177, wherein the amino acid residue in the light chain of FIXa (SEQ ID NO:756) is K100.

[0236] Embodiment 179. The anti-FIXa antibody, or antigen binding portion thereof, of any one of embodiments 169 to 178, wherein the epitope overlaps the binding site of FVIIIa to FIXa.

[0237] Embodiment 180. The anti-FIXa antibody, or antigen binding portion thereof, of any one of embodiments 169 to 179, which cross-competes with FVIIIa for binding to FIXa.

[0238] Embodiment 181. The anti-FIXa antibody, or antigen binding portion thereof, of any one of embodiments 169 to 180, wherein the antibody or antigen binding portion thereof blocks binding of FVIIIa to FIXa.

[0239] Embodiment 182. The anti-FIXa antibody, or antigen binding portion thereof, of any one of embodiments 1 to 12, which specifically binds to FIXa, comprising VH CDR1, CDR2, and CDR3 and VL CDR1, CDR2, and CDR3, wherein

(i) the VH CDR1 comprises a VH CDR1 selected from the group consisting of VH CDR1s in TABLE 7 or the VH CDR1 with one or two mutations; and/or,
(ii) the VH CDR2 comprises a VH CDR2 selected from the group consisting of VH CDR2s in TABLE 7 or the VH CDR2 with one or two mutations; and/or,
(iii) the VH CDR3 comprises a VH CDR3 selected from the group consisting of VH CDR3s in TABLE 7 or the VH CDR3 with one or two mutations; and/or,
(iv) the VL CDR1 comprises a VL CDR1 selected from the group consisting of VL CDR1s in TABLE 7 or the VL CDR1 with one or two mutations; and/or,
(v) the VL CDR2 comprises a VL CDR2 selected from the group consisting of VL CDR2s in TABLE 7 or the VL CDR2 with one or two mutations; and/or,
(vi) the VL CDR3 comprises a VL CDR3 selected from the group consisting of VL CDR3s in TABLE 7 or the VL CDR3 with one or two mutations.

[0240] Embodiment 183. The anti-FIXa antibody, or antigen binding portion thereof, of embodiment 182 which specifically binds to FIXa, comprising VH CDR1, CDR2, and CDR3 and VL CDR1, CDR2, and CDR3, wherein the VH CDR3 comprises the amino acid sequence ARDXIGGYAGYYGMDV (SEQ ID NO: 2196), wherein X₁ is L or V.

[0241] Embodiment 184. The isolated anti-FIXa antibody, or antigen binding portion thereof, of embodiment 183, wherein

(i) the VH CDR1 comprises the amino acid sequence FTFX₁SX₂X₃MX₄ (SEQ ID NO: 2194), wherein X₁ is S, G or E, X₂ is Y or F, X₃ is S, E, G, or D, and X₄ is N, V, A, or T; and/or
(ii) the VH CDR2 comprises the amino acid sequence X₅ISX₆X₇X₈X₉X₁₀IYYADSVKG (SEQ ID NO: 2195), wherein X₅ is S, A, Y, or G, X₆ is S or A, X₇ is S, A, or G, X₃ is S, G, or D, X₉ is S, T, or G, and X₁₀ is Y or T.

[0242] Embodiment 185. The isolated anti-FIXa antibody, or antigen binding portion thereof, of any one of embodiments 182 to 184, which comprises VL CDR1, CDR2 and CDR3, wherein VL CDR3 comprises the amino acid sequence QQYANFPYT (SEQ ID NO:2168).

[0243] Embodiment 186. The isolated anti-FIXa antibody, or antigen binding portion thereof, of embodiment 185, which comprises VL CDR1, CDR2 and CDR3, wherein

(i) VL CDR1 comprises the amino acid sequence QASQDIANYLN (SEQ ID NO:2116); and/or,
(ii) VL CDR2 comprises the amino acid sequence DASNLET (SEQ ID NO:2142).

[0244] Embodiment 187. The anti-FIXa antibody, or antigen binding portion thereof, of embodiment 182, which comprises VH CDR1, CDR2, and CDR3 comprising a VH CDR1 selected from SEQ ID NOs: 2038 to 2047, a VH CDR2 selected from SEQ ID NOs: 2064 to 2073, and a VH CDR3 selected from SEQ ID NOs: 2090 to 2099, and/or VL CDR1, CDR2, and CDR3 comprising a VL CDR1 selected from SEQ ID NOs: 2116 to 2125, a VL CDR2 selected from SEQ ID NOs: 2142 to 2151, and a VL CDR3 selected from SEQ ID NOs: 2168 to 2177.

[0245] Embodiment 188. The isolated anti-FIXa antibody, or antigen binding portion thereof, of embodiment 182, which specifically binds to FIXa, comprising VH CDR1, CDR2, and CDR3 and VL CDR1, CDR2, and CDR3, wherein the VH CDR3 comprises the amino acid sequence X₁RDVX₂GYAGX₃YGMDV (SEQ ID NO: 2198), wherein X₁ is A or V, X₂ is G or S, and X₃ is Y or F.

[0246] Embodiment 189. The isolated anti-FIXa antibody, or antigen binding portion thereof, of embodiment 188, wherein (i) the VH CDR1 comprises the amino acid sequence FTFGSYDMN (SEQ ID NO: 2048); and/or (ii) the VH CDR2 comprises the amino acid sequence SISX₁X₂X₃SYIX₄YAX₅SVKG (SEQ ID NO: 2197), wherein X₁ is S or D, X₂ is G or S, X₃ is E or A, X₄ is Y or A, and X₅ is E or D.

[0247] Embodiment 190. The isolated anti-FIXa antibody, or antigen binding portion thereof, of any one of embodiments 182, 188 or 189, which specifically binds to FIXa, comprising VH CDR1, CDR2, and CDR3 and VL CDR1, CDR2, and CDR3, wherein the VL CDR3 comprises the amino acid sequence X₁QYAX₂FPYT (SEQ ID NO: 2201), wherein X₁ is Q or S, and X₂ is N or R.

[0248] Embodiment 191. The isolated anti-FIXa antibody, or antigen binding portion thereof, of embodiment 190, which comprises VL CDR1, CDR2 and CDR3, wherein

(i) the VL CDR1 comprises the amino acid sequence X₁AX₂X₃X₄IX₅X₆YLN (SEQ ID NO: 2199), wherein X₁ is Q, G, or E, X₂ is S or N, X₃ is Q or E, X₄ is D or Y, X₅ is A or S, X₆ is N or D; and/or
(ii) the VL CDR2 comprises the amino acid sequence DAX₇NLX₈X₉ (SEQ ID NO: 2200), wherein X₇ is S or A, X₈ is E, H or Q, and X₉ is Tor Y.

[0249] Embodiment 192. The anti-FIXa antibody, or antigen binding portion thereof, of embodiment 182, which comprises VH CDR1, CDR2, and CDR3 comprising a VH CDR1 selected from SEQ ID NOs: 2048 to 2052, a VH CDR2 selected from SEQ ID NOs: 2074 to 2078, and a VH CDR3 selected from SEQ ID NOs: 2100 to 2104, and/or VL CDR1, CDR2, and CDR3 comprising a VL CDR1 selected from SEQ ID NOs: 2126 to 2130, a VL CDR2 selected from SEQ ID NOs: 2152 to 2156, and a VL CDR3 selected from SEQ ID NOs: 2178 to 2182.

[0250] Embodiment 193. The isolated anti-FIXa antibody, or antigen binding portion thereof, of embodiment 182, which specifically binds to FIXa, comprising VH CDR1, CDR2, and CDR3 and VL CDR1, CDR2, and CDR3, wherein the VH CDR3 comprises the amino acid sequence ARDGPX₁X₂X₃DYYMDV (SEQ ID NO: 2204), wherein X₁ is R or Q, X₂ is V, D, L or E, and X₃ is S or V.

[0251] Embodiment 194. The isolated anti-FIXa antibody, or antigen binding portion thereof, of embodiment 193, which comprises VH CDR1, CDR2 and CDR3, wherein

(i) the VH CDR1 comprises the amino acid sequence YTFX₁X₂YX₃MH (SEQ ID NO: 2202), wherein X₁ is T or H, X₂ is S, G, or H, and X₃ is Y or P; and/or
(ii) the VH CDR2 comprises the amino acid sequence X₄INPSX₈GX₆TX₇YAQKFQG (SEQ ID NO: 2203), wherein X₄ is I or S, X₅ is G or R, X₆ is S or R, and X₇ is S or E.

[0252] Embodiment 195. The isolated anti-FIXa antibody, or antigen binding portion thereof, of any one of embodiments 182, 193 or 194, which specifically binds to FIXa, comprising VH CDR1, CDR2, and CDR3 and VL CDR1, CDR2, and CDR3, wherein the VL CDR3 comprises the amino acid sequence QQRDNWPFT (SEQ ID NO:2116).

[0253] Embodiment 196. The isolated anti-FIXa antibody, or antigen binding portion thereof, of embodiment 195, which comprises VL CDR1, CDR2 and CDR3, wherein

(i) the VL CDR1 comprises the amino acid sequence RASQSVSSYLA (SEQ ID NO:2116); and/or,
(ii) the VL CDR2 comprises the amino acid sequence DASNRAT (SEQ ID NO:2116).

[0254] Embodiment 197. The anti-FIXa antibody, or antigen binding portion thereof, of embodiment 182, wherein the anti-FIXa antibody or antigen binding portion thereof comprises VH CDR1, CDR2, and CDR3 comprising a VH CDR1 selected from SEQ ID NOs: 2053 to 2057, a VH CDR2 selected from SEQ ID NOs: 2079 to 2083, and a VH CDR3 selected from SEQ ID NOs: 2105 to 2109, and/or VL CDR1, CDR2, and CDR3 comprising a VL CDR1 selected from SEQ ID NOs: 2131 to 2135, a VL CDR2 selected from SEQ ID NOs: 2157 to 2161, and a VL CDR3 selected from SEQ ID NOs: 2183 to 2187.

[0255] Embodiment 198. The isolated anti-FIXa antibody, or antigen binding portion thereof, of embodiment 182, which specifically binds to FIXa, comprising VH CDR1, CDR2, and CDR3 and VL CDR1, CDR2, and CDR3, wherein the VH CDR3 comprises the amino acid sequence ARDKYQDYSX₁DI (SEQ ID NO: 2207), wherein X₁ is F or V.

[0256] Embodiment 199. The isolated anti-FIXa antibody, or antigen binding portion thereof, of embodiment 198, which comprises VH CDR1, CDR2 and CDR3, wherein

(i) the VH CDR1 comprises the amino acid sequence GSIX₁SX₂X₃YX₄WX₅(SEQ ID NO: 2205), wherein X₁ is S or A, X₂ is S, T, G, or V, X₃ is S or A, X₄ is Y or A, and X₅ is G, V, N, or S; and/or
(ii) the VH CDR2 comprises the amino acid sequence X₆IX₇X₈X₉GX₁₀TX₁₁YNPSLKS (SEQ ID NO: 2206), wherein X₆ is S or Y, X₇ is S, Y, R, T or Q, X₈ is Y, G, P or A, X₉ is S or Q, X₁₀ is S or K, and X₁₁ is Y or Q.

[0257] Embodiment 200. The isolated anti-FIXa antibody of embodiment 182, 198 or 199, which comprises VL CDR1, CDR2 and CDR3, wherein the VL CDR3 comprises the amino acid sequence QQANFLPFT (SEQ ID NO:2188).

[0258] Embodiment 201. The isolated anti-FIXa antibody, or antigen binding portion thereof, of embodiment 200, which comprises VL CDR1, CDR2 and CDR3, wherein

(i) the VL CDR1 comprises the amino acid sequence RASQGIDSWLA (SEQ ID NO:2136); and/or,
(ii) the VL CDR2 comprises the amino acid sequence AASSLQS (SEQ ID NO:2162).

[0259] Embodiment 202. The anti-FIXa antibody, or antigen binding portion thereof, of embodiment 182, wherein the anti-FIXa antibody or antigen binding portion thereof comprises VH CDR1, CDR2, and CDR3 comprising a VH CDR1 selected from SEQ ID NOs: 2058 to 2063, a VH CDR2 selected from SEQ ID NOs: 2084 to 2089, and a VH CDR3 selected from SEQ ID NOs: 2110 to 2115, and/or VL CDR1, CDR2, and CDR3 comprising a VL CDR1 selected from SEQ ID NOs: 2136 to 2141, a VL CDR2 selected from SEQ ID NOs: 2162 to 2167, and a VL CDR3 selected from SEQ ID NOs: 2188 to 2193.

[0260] Embodiment 203. The anti-FIXa antibody, or antigen binding portion thereof, of any one of embodiments 182 to 202, comprising a VH and a VL, wherein

(i) the VH comprises an amino acid sequence which is at least about 80%, at least about 85%, at least about 90%, at least about 95%, at least about 96%, at least about 97%, at least about 98%, at least about 99%, or about 100% identical to the amino acid sequence selected from the group consisting of SEQ ID NOs: 1935, 1939, 1943, 1947, 1951, 1955, 1959, 1963, 1967, 1971, 1975, 1979, 1983, 1987, 1991, 1995, 1999, 2003, 2007, 2011, 2015, 2019, 2023, 2027, 2031, and 2035; and/or
(ii) the VL comprises an amino acid sequence which is at least about 80%, at least about 85%, at least about 90%, at least about 95%, at least about 96%, at least about 97%, at least about 98%, at least about 99%, or about 100% identical to the amino acid sequence selected from the group consisting of SEQ ID NOs: 1937, 1941, 1945, 1949, 1953, 1957, 1961, 1965, 1969, 1973, 1977, 1981, 1985, 1989, 1993, 1997, 2001, 2005, 2009, 2013, 2017, 2021, 2025, 2029, 2033, and 2037.

[0261] Embodiment 204. The anti-FIXa antibody, or antigen binding portion thereof, of any one of embodiments 182 to 203, comprising a VH and a VL, wherein

(a1) the VH and the VL comprise SEQ ID NOs: 1935 and 1937, respectively (BIIB-9-3595);
(a2) the VH and the VL comprise SEQ ID NOs: 1939 and 1941, respectively (BIIB-9-3601);
(a3) the VH and the VL comprise SEQ ID NOs: 1943 and 1945, respectively (BIIB-9-3604);
(a4) the VH and the VL comprise SEQ ID NOs: 1947 and 1949, respectively (BIIB-9-3617);
(a5) the VH and the VL comprise SEQ ID NOs: 1951 and 1953, respectively (BIIB-9-3618);
(a6) the VH and the VL comprise SEQ ID NOs: 1955 and 1957, respectively (BIIB-9-3621);
(a7) the VH and the VL comprise SEQ ID NOs: 1959 and 1961, respectively (BIIB-9-3647);
(a8) the VH and the VL comprise SEQ ID NOs: 1963 and 1965, respectively (BIIB-9-3649);
(a9) the VH and the VL comprise SEQ ID NOs: 1967 and 1969, respectively (BIIB-9-3650);
(a10) the VH and the VL comprise SEQ ID NOs: 1971 and 1973, respectively (BIIB-9-3654);
(a11) the VH and the VL comprise SEQ ID NOs: 1975 and 1977, respectively (BIIB-9-3753);
(a12) the VH and the VL comprise SEQ ID NOs: 1979 and 1981, respectively (BIIB-9-3754);
(a13) the VH and the VL comprise SEQ ID NOs: 1983 and 1985, respectively (BIIB-9-3756);
(a14) the VH and the VL comprise SEQ ID NOs: 1987 and 1989, respectively (BIIB-9-3764);
(a15) the VH and the VL comprise SEQ ID NOs: 1991 and 1993, respectively (BIIB-9-3766);
(a16) the VH and the VL comprise SEQ ID NOs: 1995 and 1997, respectively (BIIB-9-3707);
(a17) the VH and the VL comprise SEQ ID NOs: 1999 and 2001, respectively (BIIB-9-3709);
(a18) the VH and the VL comprise SEQ ID NOs: 2003 and 2005, respectively (BIIB-9-3720);
(a19) the VH and the VL comprise SEQ ID NOs: 2007 and 2009, respectively (BIIB-9-3727);
(a20) the VH and the VL comprise SEQ ID NOs: 2011 and 2013, respectively (BIIB-9-3745);
(a21) the VH and the VL comprise SEQ ID NOs: 2015 and 2017, respectively (BIIB-9-3780);
(a22) the VH and the VL comprise SEQ ID NOs: 2019 and 2021, respectively (BIIB-9-3675);
(a23) the VH and the VL comprise SEQ ID NOs: 2023 and 2025, respectively (BIIB-9-3681);
(a24) the VH and the VL comprise SEQ ID NOs: 2027 and 2029, respectively (BIIB-9-3684);
(a25) the VH and the VL comprise SEQ ID NOs: 2031 and 2033, respectively (BIIB-9-3698); or,
(a26) the VH and the VL comprise SEQ ID NOs: 2035 and 2037, respectively (BIIB-9-3704).

### BRIEF DESCRIPTION OF THE DRAWINGS/FIGURES

[0262] FIG. 1A is a schematic representation of the domain organization of FIX zymogen and activated FIX with and without a substrate mimic bound in the active site (FIXa+EGR-CMK) (free FIXa and FIXa-SM, respectively). FIG. 1B is a schematic representation of the domain organization of FX zymogen and activated FX with and without a substrate mimic bound in the active site (FXa+EGR-CMK). In this representation, HC is the heavy chain of FIX, FIXa, FX, or FXa. LC is the light chain of FIX, FIXa, FX, or FXa.

[0263] FIG. 2 shows a schematic representation of the antibody generation, antibody characterization, and functional characterization for certain embodiments described herein.

[0264] FIGS. 3A-3D depict 95 anti-FIX antibodies disclosed herein, discovered by the antibody generation process described in FIG. 2. The germline, CDR length, CDR amino acid sequences, and SEQ ID NO are provided for both the VH and VL the antibodies. The full sequences of the VH and VL are provided in TABLE 4. The SEQ ID number for each CDR sequence is represented in TABLE 4. FIGS. 3A-3C present antibodies that preferentially bind to activated clotting factor IX (FIXa) (e.g., free FIXa and/or FIXa covalently modified by EGR- or LTR-CMK (FIXa-SM) compared to FIX zymogen (e.g., non-activatable FIX). In particular, FIG. 3A lists antibodies preferentially bind to FIXa-SM compared to free FIXa or FIXa zymogen (e.g., non-activatable FIX) (Class I). FIG. 3B lists antibodies preferentially bind to free FIXa compared to FIXa-SM or FIX zymogen (e.g., non-activatable FIX) (Class II). FIG. 3C lists antibodies that bind to either FIXa-SM or free FIXa, but do not appreciably bind to FIX zymogen (e.g., non-activatable FIX) (Class III). FIG. 3D lists antibodies that preferentially bind to FIX zymogen (e.g., non-activatable FIX) compared to free FIXa or FIXa-SM) (Class IV).

[0265] FIGS. 4A and 4B shows binding by Bio-Layer Interferometry (BLI) measurements of sensor-associated IgG to the indicated antigen, FIX zymogen (e.g., non-activatable FIX) (Haematologic Technologies, Inc., Essex Junction, Vt., USA) or FIXa (Haematologic Technologies, Inc., Essex Junction, Vt., USA). The maximum BLI response (nm) for each antibody is plotted on the y-axis.

[0266] FIG. 5 is a table presenting apparent monovalent affinity values (K_{D}) to free FIXa for each of the listed antibodies as determined by 1:1 fitting algorithms provided in the ForteBio Data Analysis 9.0 software.

[0267] FIGS. 6A-6E depict the measurement of binding by BLI of sensor associated IgG to the indicated antigen (free FIXa or FIX zymogen (e.g., non-activatable FIX)). FIG. 6A shows the measurement of binding for antibody BIIB-9-484 (VH: SEQ ID NO:31; VL: SEQ ID NO:221). FIG. 6B shows the measurement of binding of antibody BIIB-9-440 (VH: SEQ ID NO:19; VL: SEQ ID NO:209). FIG. 6C shows the measurement of binding of antibody BIIB-9-882 (VH: SEQ ID NO:115; VL: SEQ ID NO:301). FIG. 6D shows the measurement of binding of antibody BIIB-9-460 (VH: SEQ ID NO:23; VL: SEQ ID NO:213). FIG. 6E shows the measurement of binding for antibody BIIB-9-433 (VH: SEQ ID NO: 127; VL: SEQ ID NO: 313). The plots show the BLI response (nm) for association and dissociation as a function of time. FIG. 6F depicts a table of apparent monovalent affinity (K_{D}) to FIX zymogen (e.g., non-activatable FIX) and free FIXa, respectively, for each of the listed antibodies (i.e., BIIB-9-484, BIIB-9-440, BIIB-9-882, BIIB-9-460, and BIIB-9-433) described in FIGS. 6A-6E, as determined by 1:1 fitting algorithms provided in the ForteBio Data Analysis 9.0 software.

[0268] FIG. 7 shows the measurement of binding by BLI of sensor-associated IgG to the indicated antigen, free FIXa (Haematologic Technologies, Inc., Essex Junction, Vt., USA) or FIXa-SM (e.g., FIXa+EGR-CMK (Haematologic Technologies, Inc., Essex Junction, Vt., USA)). The maximum BLI response (nm) for each antibody is plotted on the y-axis.

[0269] FIGS. 8A-8E exhibit the measurement of binding by BLI of sensor associated IgG to the indicated antigens (FIXa-SM, e.g., FIXa+EGF-CMK, and free FIXa). FIG. 8A shows the measurement of binding for antibody BIIB-9-484 (VH: SEQ ID NO:31; VL: SEQ ID NO:221). FIG. 8B shows the measurement of binding of antibody BIIB-9-440 (VH: SEQ ID NO:19; VL: SEQ ID NO:209). FIG. 8C shows the measurement of binding of antibody BIIB-9-882 (VH: SEQ ID NO:115; VL: SEQ ID NO:301). FIG. 8D shows the measurement of binding of antibody BIIB-9-460 (VH: SEQ ID NO:23; VL: SEQ ID NO:213). FIG. 8E shows the measurement of binding for antibody BIIB-9-433 (VH: SEQ ID NO: 127; VL: SEQ ID NO: 313). The provided plots show the BLI response (nm) for association and dissociation as a function of time. FIG. 8F depicts a table of apparent monovalent affinity (K_{D}) to (i) free FIXa or (ii) FIXa-SM (e.g., FIXa+EGR-CMK) for each of the listed antibodies (i.e., BIIB-9-484, BIIB-9-440, BIIB-9-882, BIIB-9-460, and BIIB-9-433) as determined by 1:1 fitting algorithms provided in the ForteBio Data Analysis 9.0 software.

[0270] FIGS. 9A-9D display the measurement of binding by BLI of listed sensor-associated IgG to the indicated antigen FIXn (non-activatable FIX), free FIXa, or FXa-SM (e.g., FIXa+EGR-CMK) (all obtained from Haematologic Technologies, Inc., Essex Junction, Vt., USA) as a function of time. The maximum BLI response (nm) is provided on each sensorgram. FIG. 9A shows the measurement of binding for representative antibodies in Class I (FIG. 3A), e.g., antibody BIIB-9-484 and antibody BIIB-9-460 (VH: SEQ ID NO: 23; VL: SEQ ID NO:213). FIG. 9B shows the measurement of binding for representative antibodies in Class II (FIG. 3B), e.g., antibody BIIB-9-416 (VH: SEQ ID NO:93; VL: SEQ ID NO:279) and antibody BIIB-9-885 (VH: SEQ ID NO:97; VL: SEQ ID NO:283). FIG. 9C shows the measurement of binding for a representative antibody in Class III (FIG. 3C), e.g., antibody BIIB-9-1287 (VH: SEQ ID NO:181; VL: SEQ ID NO:367). FIG. 9D shows the measurement of binding for a representative antibody in Class IV (FIG. 3D), e.g., antibody BIIB-9-397 (VH: SEQ ID NO:183; VL: SEQ ID NO:369).

[0271] FIG. 10 shows a table listing 95 antibodies disclosed herein, in addition to their assigned class based on antigen binding profiles as determined by BLI binding assays. Antibodies were assigned to classes if they exhibited a 0.1 or greater difference in BLI response to one antigen over another using the assay parameters defined in the examples. Class I antibodies corresponds to the antibodies in FIG. 3A. Class II antibodies correspond to the antibodies in FIG. 3B. Class III antibodies correspond to the antibodies in FIG. 3C. Class IV antibodies correspond to the antibodies in FIG. 3D.

[0272] FIG. 11 shows a table listing the maximum wavelength (nm) of each indicated antibody as determined by screening for propensity to self-interact by AC-SINS. A threshold value of 540 nm is set based on internal controls, with antibodies exceeding the threshold shaded in black (indicating a potential for self-interaction).

[0273] FIGS. 12A-12C are tables listing 94 antibodies disclosed herein, discovered by the antibody generation process. The germline, CDR length, CDR amino acid sequences, and SEQ ID NOs are provided for both the VH and VL of each of the 94 antibodies. The sequences of the complete VH and VL for each antibody are presented in TABLE 4. FIG. 12A and FIG. 12B present antibodies that preferentially bind to FX zymogen (e.g., non-activatable FX) compared to activated clotting factor FX (FXa) (e.g., FXa covalently modified by EGR- or LTR-CMK (FXa-SM) (Class V). FIG. 12C presents antibodies that preferentially bind to activated clotting factor FX (FXa) (e.g., FXa covalently modified by EGR- or LTR-CMK (FXa-SM) compared to FX zymogen (e.g., non-activatable FX) (Class VI).

[0274] FIGS. 13A and 13B depict the measurement of binding by BLI of sensor-associated IgG to the indicated antigen, FX zymogen or FXa-SM (e.g., FXa+EGR-CMK). The maximum BLI response (nm) for each antibody is plotted on the y-axis.

[0275] FIG. 14 shows a table of apparent monovalent affinity (K_{D}) to FX zymogen in M for each of the listed antibodies as determined by 1:1 fitting algorithms provided in the ForteBio Data Analysis 9.0 software.

[0276] FIG. 15 shows a table listing the maximum wavelength (nm) of each indicated antibody as determined by screening for propensity to self-interact by AC-SINS. A threshold value of 540 nm was set based on internal controls. Antibodies exceeding the threshold are shaded in black, which indicates a potential for self-interaction.

[0277] FIGS. 16A-16D show 202 bispecific antibodies identified as having the ability to replace FVIIIa-like function in a chromogenic Factor Xa generation assay. The 202 bispecific antibodies are separated into four groups, and four corresponding sub-figures. FIG. 16A shows the rates of FXa chromogenic substrate cleavage for the first group of bispecific antibodies (1-51 of 202). FIG. 16B shows the rates of FXa chromogenic substrate cleavage for the second group of bispecific antibodies (52-102 of 202). FIG. 16C shows the rates of FXa chromogenic substrate cleavage for the third group of bispecific antibodies (103-152 of 202). FIG. 16D shows the rates of FXa chromogenic substrate cleavage for the fourth group of bispecific antibodies (153-202 of 202). In each case, the mean baseline rate in the absence of bispecific antibody is indicated by the dashed line.

[0278] FIG. 17 depicts the rates of FXa chromogenic substrate cleavage for a subset of bispecific antibodies in the IgG4 format. The mean baseline rate in the absence of bispecific antibody is indicated by the dashed line.

[0279] FIG. 18 illustrates the kinetics of FXa chromogenic substrate cleavage in the presence of three representative bispecific antibodies. Compared to the baseline control (in which no antibody was added to the reaction mixture), BIIB-9-484/BIIIB-12-915, BIIB-9-619/BIIB-12-925, and BIIB-9-578/BIIB-12-917 were able to increase the rate of FXa chromogenic substrate cleavage, as indicated by the increase in OD over time.

[0280] FIG. 19 illustrates the ability of BIIB-9-484/BIIB-12-917, BIIB-9-484/BIIB-12-915, and BIIB-9-484/BIIB-12-1306 to replace the function of FVIIIa in a one-stage clotting assay in FVIII deficient plasma (as indicated by the decrease in clotting time). FVIII-deficient plasma with no bispecific antibody is shown for comparison.

[0281] FIG. 20 shows that the ability of a bispecific antibody, BIIB-9-484/BIIB-12-917, to replace FVIIIa-function in a one-stage clotting assay in FVIII deficient plasma is dependent on the bispecific format. Homodimeric BIIB-9-484, homodimeric BIIB-12-917, and a mixture of the two homodimers were unable to replace FVIIIa-like function. FVIII deficient plasma with no antibody is shown for comparison.

[0282] FIG. 21 exhibits the BLI-binding assay to assess co-binding of each target antigen to the indicated bispecific antibody using dip and read streptavidin biosensors. The sensorgram plots the BLI response (nm) as a function of time, with each stage of the experiment separated by a black vertical line. An increase in response at a particular stage is indicative of protein loading.

[0283] FIG. 22A lists the CDR sequences of BIIB-9-484 and two affinity matured daughters, BIIB-9-1335 and BIIB-9-1336. A CLUSTAL format multiple sequence alignment by MAFFT (v7.205) of the VH segments of BIIB-9-484, BIIB-9-1335, BIIB-9-1336 is provided. Degree of amino acid conservation is indicating above the alignment (“*”=identical; “:”=strongly conserved; “.”=poorly conserved), as well as the bars below the alignment. The VH and VL CDRs are underlined. The sequence before VH-CDR1 is framework region (FR) 1; the sequence after VH-CDR1 and before VH-CDR2 is FR2; the sequence after VH-CDR2 and before VH-CDR3 is FR3; and the sequence after VH-CDR3 is FR4. The sequence before VL-CDR1 is framework region (FR) 1; the sequence after VL-CDR1 and before VL-CDR2 is FR2; the sequence after VL-CDR2 and before VL-CDR3 is FR3; and the sequence after VL-CDR3 is FR4. FIGS. 22B-22D show the BLI-binding profile of free FIXa to BIIB-9-484, BIIB-9-1335, and BIIB-9-1336, respectively.

[0284] FIG. 23 shows that increasing the affinity of the anti-FIXa arm in the context of a bispecific antibody with FVIIIa-like activity results in higher activity in a one-stage clotting assay. An example of this is illustrated in the plot above, in which bispecific antibodies with high affinity anti-FIXa arms (BIIB-9-1335/BIIB-12-917 and BIIB-9-1336/BIIB-12-917) show a further decrease in clotting time compared to the bispecific antibody with a lower affinity anti-FIXa arm (BIIB-9-484/BIIB-12-917).

[0285] FIG. 24A shows the binding affinity of emicizumab (ACE910) sequence identical bispecific antibody (“emicizumab biosimilar”) to FIX zymogen, activated FIX, FX zymogen, and activated FX (i.e., 1 μM, 1 μM, 1 μM, and 1 μM, respectively). FIG. 24B shows the binding affinity of a bispecific molecule (BS-027125) to FIX zymogen, activated FIX, FX zymogen, and activated FX (i.e., 8 nM, 2 nM, 20 nM, and not detected, respectively).

[0286] FIG. 25 shows the clotting time (sec) of FVIII (inverted triangle), BS-025 FIXa homodimer (big diamond), BS-027 FX homodimer (small diamond), BS-027025 homodimer mixture (triangle), and BS-027025 bispecific (square) over various concentrations (IU/mL or μM).

[0287] FIG. 26 shows the FVIII activity (FVIII equivalent %) by BS-027125 (Square), BS-027125 FIXa homodimer (triangle), and BS-027125 FX homodimer (circle). The FVIII activity was measured by one-stage clotting assay.

[0288] FIG. 27 shows the nM FXa generation by rFVIII (big circle), BS-027125 (square), BS-027125 FIXa homodimer (triangle), BS-027125 FX homodimer (inverted triangle), and BS-027125 (no PL) (small circle) measured by chromogenic factor Xa (FXa) generation assay.

[0289] FIG. 28A shows the results of thrombin generation assay of BS-027125. The left panel shows the lag time (min), and the right panel shows the peak.

[0290] FIG. 28B shows the amount of thrombin generated by rFVIII (left panel) and BS-027125 (right panel).

[0291] FIG. 29 shows nM FXa generated in the presence of rFVIII, emicizumab biosimilar, or BS-027125 with either PC/PS (80%/20%) or PC/PEPS (40%/40%/20%) phospholipid vesicles (upper panels) and the fold change in activity contributed by PC/PEPS over PC/PS phospholipid vesicles (lower panels).

[0292] FIG. 30 shows the results of thrombin generation assay on PC/PEPS phospholipids in the presence of rFVIII, emicizumab biosimilar, and BS-027125. The upper panels show the lag time (min); the middle panels show the peak thrombin (nM); and the lower panels show the endogenous thrombin potential (ETP) (nM*min).

[0293] FIGS. 31A, 31B, 31C and 31D show the epitope binning of 47 different anti-FIXa antibodies against each other as determined by biolayer interferometry. FIG. 31A and FIG. 31B show the Octet profiles for non-competitive and competitive binders, respectively. FIG. 31C summarizes the 47×47 interactions tested and whether the antibodies pairs result in competitive or non-competitive binding. Dark gray squares indicate antibody pairs that cross-block, indicating that they fall into the same bin. Medium gray squares indicate antibody pairs that do not cross-block, indicating that they fall into different bins. White squares indicate unidirectional conflicts and light gray squares indicate antibodies for which data could not be analyzed. FIG. 31D shows node analysis of the binning network determined in FIG. 31C. The closer together two antibodies are on this map, the more similar their binning profiles are.

[0294] FIG. 32A shows the binding profile of BIIB-9-484 to FIXa in the presence and absence of calcium using biolayer interferometry. The dashed line indicates the end of the association phase and the start of the dissociation phase.

[0295] FIG. 32B shows the binding profile of BIIB-9-1336 to FIXa in the presence and absence of calcium using biolayer interferometry. The dashed line indicates the end of the association phase and the start of the dissociation phase.

[0296] FIG. 33A shows the rate of substrate cleavage by FIXa (250 nM) alone or in the presence of increasing concentrations of two different anti-FIXa antibodies (BIIB-9-1336 and BIIB-9-579) or an anti-FX antibody control (BIIB-12-917). BIIB-9-1336 was tested as a homodimeric, bivalent antibody (“BIIB-9-1336’), as a one armed antibody (“BIIB-9-1336 one-armed”) and in a bispecific configuration with BIIB-12-917 (“BIIB-9-1336/BIIB-12-917”). The rate of substrate cleavage is expressed in mOD/minute and increasing amounts of antibody are expressed in terms of the concentration (nM) of FIXa-Ab complex.

[0297] FIG. 33B shows the fold increase in FIXa amidolytic activity that is seen for 500 nM FIXa in the presence of a panel of BIIB-9-484, BIIB-9-1336, BIIB-9-619, and BIIB-9-578 antibodies.

[0298] FIG. 33C shows the rate of substrate cleavage by FIXa across varying concentrations of substrate in the presence or absence of saturating amounts of BIIB-9-1336.

[0299] FIG. 33D shows the K_{M} and Vₘₐₓ for FIXa in the presence and absence of BIIB-9-1336.

[0300] FIG. 34A and FIG. 34B show the rate of ATIII inhibition of FIXa in the presence or absence of anti-FIXa antibodies. FIG. 34A shows the appearance of a band at 75 kDa corresponding to ATIII-FIXa complex. The rate of complex formation is indicative of ATIII inhibition of FIXa and is increased in the presence of BIIB-9-1335 and BIIB-9-1336. FIG. 34B shows the band intensity of ATIII-FIXa complex formation quantified and graphed at different time points.

[0301] FIG. 35 is cartoon representation of the crystal structure of the Fab region of BIIB-9-1336 in complex with the EGF2 and serine protease domain of FIXa shown in two orientations.

[0302] FIG. 36 shows the serine protease domain of FIXa in surface representation with the epitopes of BIIB-9-1336 (1336 epitope) and FVIIIa (FVIIIa epitope) mapped onto the surface. The BIIB-9-1336 epitope on FIXa and the FVIIIa epitope on FIXa are colored in black. Residues shared between the two epitopes are outlined in white.

[0303] FIG. 37 lists the specific amino acids residues in the FIXa heavy chain that constitute the BIIB-9-1336 and FVIIIa epitopes and correspond to the residues highlighted in FIG. 36. Residues shared between the two epitopes are shown underlined and in bold. Residues shown in parentheses are not shown in FIG. 36 as they do not agree across published reports. The numbering of the amino acid residues are based on the chymotrypsinogen numbering. BIIB-9-1336 also contacts one residue in the light chain of FIXa and is indicated by the asterisk. Light chain contacts for FVIIIa are not listed.

[0304] FIG. 38A shows the binding of BIIB-12-917 to a panel of FX variants including wild type Factor X zymogen, wild type activated FX, activated FX that retains the activation peptide, zymogen FX lacking the activation peptide, and a chimeric FIX construct in which the FIX activation peptide has been replaced by the FX activation peptide, by biolayer interferometry. The dashed line indicates the end of the association phase and the start of the dissociation phase.

[0305] FIG. 38B shows cartoon representations of each of the above-mentioned FX variants. The + and − signs indicate whether BIIB-12-917 binds. These data show that the epitope of BIIB-12-917 is in the activation peptide region of FX.

### DETAILED DESCRIPTION OF THE INVENTION

[0306] The present disclosure provides antibodies that preferentially bind to specific forms of clotting factors. In particular, the disclosure provides antibodies and antigen binding portion thereof that specifically binds to FIX (e.g., antibodies and antigen binding portion thereof that preferentially bind to activated factor IX (FIXa) in the presence of FIXa and factor IX zymogen (FIXz)). The disclosure also provides antibodies and antigen binding portions thereof that specifically and preferentially bind to FX (FX zymogen (FXz)) in the presence of FXz and FXa.

[0307] Also provided are bispecific molecules (e.g., antibodies) comprising any one of anti-FIX antibodies or antigen binding portions thereof disclosed herein and any one of anti-FX antibodies or antigen binding portions thereof disclosed herein. These bispecific antibodies can bind simultaneously to FIX and FX and mimic the function of coagulation factor Villa.

[0308] The present disclosure also provides, for example, compositions comprising the binding molecules, e.g., antibodies, disclosed herein (e.g., pharmaceutical or diagnostic compositions), nucleic acids and vectors encoding the binding molecules disclosed herein, cells comprising nucleic acids encoding the binding molecules disclosed herein, methods of making, methods of treatment and diagnosis, immunoconjugates, and kits.

[0309] The headings provided herein are not limitations of the various aspects or aspects of the disclosure, which can be defined by reference to the specification as a whole. Accordingly, the terms defined immediately below are more fully defined by reference to the specification in its entirety. Before describing the present invention in detail, it is to be understood that this invention is not limited to specific compositions or process steps, as such can vary.

### I. Definitions

[0310] In order that the present disclosure can be more readily understood, certain terms are first defined. As used in this application, except as otherwise expressly provided herein, each of the following terms shall have the meaning set forth below. Additional definitions are set forth throughout the application.

[0311] The invention includes embodiments in which exactly one member of the group is present in, employed in, or otherwise relevant to a given product or process. The invention includes embodiments in which more than one, or all of the group members are present in, employed in, or otherwise relevant to a given product or process.

[0312] In this specification and the appended claims, the singular forms “a”, “an” and “the” include plural referents unless the context clearly dictates otherwise. The terms “a” (or “an”), as well as the terms “one or more,” and “at least one” can be used interchangeably herein. In certain aspects, the term “a” or “an” means “single.” In other aspects, the term “a” or “an” includes “two or more” or “multiple.”

[0313] Furthermore, “and/or” where used herein is to be taken as specific disclosure of each of the two specified features or components with or without the other. Thus, the term “and/or” as used in a phrase such as “A and/or B” herein is intended to include “A and B,” “A or B,” “A” (alone), and “B” (alone). Likewise, the term “and/or” as used in a phrase such as “A, B, and/or C” is intended to encompass each of the following aspects: A, B, and C; A, B, or C; A or C; A or B; B or C; A and C; A and B; B and C; A (alone); B (alone); and C (alone).

[0314] Unless defined otherwise, all technical and scientific terms used herein have the same meaning as commonly understood by one of ordinary skill in the art to which this disclosure is related. For example, the Concise Dictionary of Biomedicine and Molecular Biology, Juo, Pei-Show, 2nd ed., 2002, CRC Press; The Dictionary of Cell and Molecular Biology, 3rd ed., 1999, Academic Press; and the Oxford Dictionary Of Biochemistry And Molecular Biology, Revised, 2000, Oxford University Press, provide one of skill with a general dictionary of many of the terms used in this disclosure.

[0315] Wherever aspects are described herein with the language “comprising,” otherwise analogous aspects described in terms of “consisting of” and/or “consisting essentially of” are also provided.

[0316] Units, prefixes, and symbols are denoted in their Système International de Unites (SI) accepted form. Numeric ranges are inclusive of the numbers defining the range. Where a range of values is recited, it is to be understood that each intervening integer value, and each fraction thereof, between the recited upper and lower limits of that range is also specifically disclosed, along with each subrange between such values. The upper and lower limits of any range can independently be included in or excluded from the range, and each range where either, neither or both limits are included is also encompassed within the invention. Where a value is explicitly recited, it is to be understood that values which are about the same quantity or amount as the recited value are also within the scope of the invention. Where a combination is disclosed, each subcombination of the elements of that combination is also specifically disclosed and is within the scope of the invention. Conversely, where different elements or groups of elements are individually disclosed, combinations thereof are also disclosed. Where any element of an invention is disclosed as having a plurality of alternatives, examples of that invention in which each alternative is excluded singly or in any combination with the other alternatives are also hereby disclosed; more than one element of an invention can have such exclusions, and all combinations of elements having such exclusions are hereby disclosed.

[0317] Nucleotides are referred to by their commonly accepted single-letter codes. Unless otherwise indicated, nucleic acids are written left to right in 5′ to 3′ orientation. Nucleotides are referred to herein by their commonly known one-letter symbols recommended by the IUPAC-IUB Biochemical Nomenclature Commission. Accordingly, A represents adenine, C represents cytosine, G represents guanine, T represents thymine, U represents uracil.

[0318] Amino acids are referred to herein by either their commonly known three letter symbols or by the one-letter symbols recommended by the IUPAC-IUB Biochemical Nomenclature Commission. Unless otherwise indicated, amino acid sequences are written left to right in amino to carboxy orientation.

[0319] About: The term “about” as used in connection with a numerical value throughout the specification and the claims denotes an interval of accuracy, familiar and acceptable to a person skilled in the art. In general, such interval of accuracy is f 10%.

[0320] Where ranges are given, endpoints are included. Furthermore, unless otherwise indicated or otherwise evident from the context and understanding of one of ordinary skill in the art, values that are expressed as ranges can assume any specific value or subrange within the stated ranges in different embodiments of the invention, to the tenth of the unit of the lower limit of the range, unless the context clearly dictates otherwise.

[0321] Administered in combination: As used herein, the term “administered in combination,” “combined administration,” or “combination therapy” means that two or more agents, e.g., a binding molecule disclosed herein, and a second agent, are administered to a subject at the same time or within an interval such that there can be an overlap of an effect of each agent on the patient. In some embodiments, they are administered within about 60, 30, 15, 10, 5, or 1 minute of one another. In some embodiments, the administrations of the agents are spaced sufficiently closely together such that a combinatorial (e.g., a synergistic) effect is achieved.

[0322] Affinity: The term “affinity” refers to the degree to which a binding molecule, e.g., an antibody, binds to an antigen so as to shift the equilibrium of antigen and binding molecule toward the presence of a complex formed by their binding. Thus, where an antigen and binding molecule are combined in relatively equal concentration, a binding molecule of high affinity will bind to the available antigen so as to shift the equilibrium toward high concentration of the resulting complex. Binding molecules, e.g., antibodies, or antigen-binding fragments, variants or derivatives thereof of the present disclosure can also be described or specified in terms of their binding affinity to an antigen. The affinity of binding molecule, e.g., an antibody, for an antigen can be determined experimentally using any suitable method. (See, e.g., Berzofsky et al., “Antibody-Antigen Interactions,” In Fundamental Immunology, Paul, W. E., Ed., Raven Press: New York, N.Y. (1984); Kuby, Janis Immunology, W. H. Freeman and Company: New York, N.Y. (1992); and methods described herein).

[0323] The measured affinity of a particular binding molecule-antigen interaction can vary if measured under different conditions (e.g., salt concentration, pH). Thus, measurements of affinity and other antigen-binding parameters (e.g., K_{D}, Kₐ, K_{d}) are preferably made with standardized solutions of binding molecule and antigen, and a standardized buffer.

[0324] The “high affinity” for a binding molecule, e.g., an antibody, refers to an equilibrium association constant (K_{aff}) of at least about 1×10⁷ liters/mole, or at least about 1×10⁸ liters/mole, or at least about 1×10⁹ liters/mole, or at least about 1×10¹⁰ liters/mole, or at least about 1×10¹¹ liters/mole. or at least about 1×10¹² liters/mole, or at least about 1×10¹³ liters/mole, or at least about 1×10¹⁴ liters/mole or greater. “High affinity” binding can vary for antibody isotypes.

[0325] K_{D}, the equilibrium dissociation constant, is a term that is also used to describe antibody affinity and is the inverse of Kn. K_{D} is obtained from the ratio of k_{d} to kₐ (i.e., k_{d}/kₐ) and is expressed as a molar concentration (M). K_{D} values for antibodies can be determined using methods well established in the art. Available methods for determining the K_{D} of an antibody include a Bio-Layer Interferometry (BLI) assay, surface plasmon resonance, a biosensor system such as a BIACORE® system or flow cytometry and Scatchard analysis. If K_{D} is used, the term “high affinity” for an antibody refers to an equilibrium dissociation constant (K_{D}) of less than about 1×10⁻⁷ M, or less than about 1×10⁻⁸ M, or less than about 1×10⁻⁹ M, or less than about 1×10⁻¹⁰ M, or less than about 1×10⁻¹¹ M, or less than about 1×10⁻¹² M, or less than about 1×10¹³ M, less than about 1×10⁻¹⁴ M, or lower.

[0326] Amino acid substitution: The term “amino acid substitution” refers to replacing an amino acid residue present in a parent or reference sequence (e.g., a wild type sequence) with another amino acid residue. An amino acid can be substituted in a parent or reference sequence (e.g., a wild type polypeptide sequence), for example, via chemical peptide synthesis or through recombinant methods known in the art. Accordingly, a reference to a “substitution at position X” refers to the substitution of an amino acid present at position X with an alternative amino acid residue. In some aspects, substitution patterns can be described according to the schema AnY, wherein A is the single letter code corresponding to the amino acid naturally or originally present at position n, and Y is the substituting amino acid residue. In other aspects, substitution patterns can be described according to the schema An(YZ), wherein A is the single letter code corresponding to the amino acid residue substituting the amino acid naturally or originally present at position n, and Y and Z are alternative substituting amino acid residues that can replace A

[0327] In the context of the present disclosure, substitutions (even when they are referred to as amino acid substitution) are conducted at the nucleic acid level, i.e., substituting an amino acid residue with an alternative amino acid residue is conducted by substituting the codon encoding the first amino acid with a codon encoding the second amino acid.

[0328] Affinity matured: The term “affinity matured” refers to a binding molecule, e.g., an antibody, that has undergone affinity maturation, a process by which binding molecules, e.g., antibodies, with increased affinity for a target antigen are produced. Thus, an affinity matured antibody is an antibody with one or more alterations in one or more CDRs thereof which result an improvement in the affinity of the antibody for antigen, compared to a parent antibody which does not possess those alteration(s). Exemplary affinity matured antibodies will have nanomolar or even picomolar affinities for the target antigen.

[0329] Any one or more methods of preparing and/or using affinity maturation libraries available in the art may be employed in order to generate affinity matured antibodies in accordance with various embodiments of the invention disclosed herein. Exemplary affinity maturation methods include random mutagenesis, bacterial mutator strains passaging, site-directed mutagenesis, mutational hotspots targeting, parsimonious mutagenesis, antibody shuffling, light chain shuffling, heavy chain shuffling, CDR1 and/or CDR1 mutagenesis, and methods of producing and using affinity maturation libraries amenable to implementing methods and uses in accordance with various embodiments of the invention disclosed herein, include, for example, those disclosed in: Prassler et al. (2009); Immunotherapy, Vol. 1 (4), pp. 571-583; Sheedy et al. (2007), Biotechnol. Adv., Vol. 25(4), pp. 333-352; WO2012/009568; WO2009/036379; WO2010/105256; US2002/0177170; WO2003/074679, all of which are herein incorporated by reference in their entirety. Marks et al. (1992) BioTechnology 10:779-783 describes affinity maturation by VH and VL domain shuffling. Random mutagenesis of CDR and/or framework residues is described by Barbas et al. (1994) Proc. Nat. Acad. Sci. USA 91:3809-3813; Schier et al. (1995) Gene 169:147-155; Yelton et al. (1995) J. Immunol. 155:1994-2004; Jackson et al. (1995) J. Immunol. 154(7):3310-9; and Hawkins et al. (1992) J. Mol. Biol. 226:889-896. Mutation at selective mutagenesis positions, contact or hypermutation positions, with an activity enhancing amino acid residue is described in U.S. Pat. No. 6,914,128.

[0330] Animal: As used herein, the term “animal” refers to any member of the animal kingdom. In some embodiments, “animal” refers to humans at any stage of development. In some embodiments, “animal” refers to non-human animals at any stage of development. In certain embodiments, the non-human animal is a mammal (e.g., a rodent, a mouse, a rat, a rabbit, a monkey, a dog, a cat, a sheep, cattle, a primate, or a pig). In some embodiments, animals include, but are not limited to, mammals, birds, reptiles, amphibians, fish, and worms. In some embodiments, the animal is a transgenic animal, genetically-engineered animal, or a clone.

[0331] Antibody: The terms “antibody” and “immunoglobulin” (abbreviated “Ig”) are used interchangeably herein and refer to a molecule comprising at least one immunoglobulin domain that specifically binds to, or is immunologically reactive with, a particular antigen. The term includes whole antibodies and any antigen binding portion or single chains thereof and combinations thereof (e.g., bispecific antibodies).

[0332] A typical antibody comprises at least two heavy chains (“HC”) and two light chains (“L”) interconnected by disulfide bonds.

[0333] Each “heavy chain” is comprised of a “heavy chain variable region” (abbreviated herein as “VH”) and a “heavy chain constant region” (abbreviated herein as “CH”). The heavy chain constant region in an unmodified antibody is comprised of three constants domains, CH1, CH2, and CH3.

[0334] Each “light chain” is comprised of a “light chain variable region” (abbreviated herein as “VL”) and a “light chain constant region”. The light chain constant region in an unmodified antibody is comprised of one constant domain, “CL”. The VH and VL regions can be further subdivided into regions of hypervariability, termed Complementarity Determining Regions (“CDR”), interspersed with regions that are more conserved, termed “framework regions” (“FW”).

[0335] Each VH and VL is composed of three CDRs and four FWs, arranged from amino-terminus to carboxy-terminus in the following order: FW1, CDR1, FW2, CDR2, FW3, CDR3, FW4. The present disclosure presents VH and VL sequences as well as the subsequences corresponding to CDR1, CDR2, and CDR3. Accordingly, a person skilled in the art would understand that the sequences of FW1, FW2, FW3 and FW4 are equally disclosed. For a particular VH, FW1 is the subsequence between the N-terminus of the VH and the N-terminus of VH-CDR1, FW2 is the subsequence between the C-terminus of VH-CDR1 and the N-terminus of VH-CDR2, FW3 is the subsequence between the C-terminus of VH-CDR2 and the N-terminus of VH-CDR3, and FW4 is the subsequence between the C-terminus of VH-CDR3 and the C-terminus of the VH. Similarly, for a particular VL, FW1 is the subsequence between the N-terminus of the VL and the N-terminus of VL-CDR1, FW2 is the subsequence between the C-terminus of VL-CDR1 and the N-terminus of VL-CDR2, FW3 is the subsequence between the C-terminus of VL-CDR2 and the N-terminus of VL-CDR3, and FW4 is the subsequence between the C-terminus of VL-CDR3 and the C-terminus of the VL.

[0336] The variable regions of the heavy and light chains contain a binding domain that interacts with an antigen. The constant regions of the antibodies can mediate the binding of the immunoglobulin to host tissues or factors, including various cells of the immune system (e.g., effector cells) and the first component (C1q) of the classical complement system. Exemplary antibodies of the present disclosure include typical antibodies, scFvs, and combinations thereof where, for example, an scFv is covalently linked (for example, via peptidic bonds or via a chemical linker) to the N-terminus of either the heavy chain and/or the light chain of a typical antibody, or intercalated in the heavy chain and/or the light chain of a typical antibody.

[0337] As used herein, the term “antibody” encompasses intact polyclonal antibodies, intact monoclonal antibodies, antibody fragments (such as Fab, Fab′, F(ab′)2, and Fv fragments), single chain variable fragment (scFv), disulfide stabilized scFvs, multispecific antibodies such as bispecific antibodies generated from at least two intact antibodies and/or antigen binding portions thereof, chimeric antibodies, humanized antibodies, human antibodies, fusion proteins comprising an antigen determination portion of an antibody, and any other modified immunoglobulin molecule comprising an antigen recognition site so long as the antibodies exhibit the desired biological activity.

[0338] An antibody can be of any the five major classes (isotypes) of immunoglobulins: IgA, IgD, IgE, IgG, and IgM, or subclasses thereof (e.g. IgG1, IgG2, IgG3, IgG4, IgA1 and IgA2), based on the identity of their heavy-chain constant domains referred to as alpha, delta, epsilon, gamma, and mu, respectively. The different classes of immunoglobulins have different and well known subunit structures and three-dimensional configurations. Antibodies can be naked or conjugated to other molecules such as therapeutic agents or diagnostic agents to form immunoconjugates.

[0339] There are at least two techniques for determining CDRs: (1) an approach based on cross-species sequence variability (i.e., Kabat et al. Sequences of Proteins of Immunological Interest, (5th ed., 1991, National Institutes of Health, Bethesda Md.)); and (2) an approach based on crystallographic studies of antigen-antibody complexes (Al-lazikani et al. (1997) J. Molec. Biol. 273:927-948)). In addition, combinations of these two approaches are sometimes used in the art to determine CDRs. The Kabat numbering system is generally used when referring to a residue in the variable domain (approximately residues 1-107 of the light chain and residues 1-113 of the heavy chain) (e.g., Kabat et al., Sequences of Immunological Interest, 5th Ed. Public Health Service, National Institutes of Health, Bethesda, Md. (1991)).

[0340] The phrases “amino acid position numbering as in Kabat,” “Kabat position,” and grammatical variants thereof refer to the numbering system used for heavy chain variable domains or light chain variable domains of the compilation of antibodies in Kabat et al., Sequences of Proteins of Immunological Interest, 5th Ed. Public Health Service, National Institutes of Health, Bethesda, Md. (1991). Using this numbering system, the actual linear amino acid sequence can contain fewer or additional amino acids corresponding to a shortening of, or insertion into, a FW or CDR of the variable domain. For example, a heavy chain variable domain can include a single amino acid insert (residue 52a according to Kabat) after residue 52 of H2 and inserted residues (e.g., residues 82a, 82b, and 82c, etc. according to Kabat) after heavy chain FW residue 82. See TABLE 1.

TABLE 1

| Loop | Kabat | AbM | Chothia |
|---|---|---|---|
| L1 | L24-L34 | L24-L34 | L24-L34 |
| L2 | L50-L56 | L50-L56 | L50-L56 |
| L3 | L89-L97 | L89-L97 | L89-L97 |
| H1 | H31-H35B | H26-H35B | H26-H32 . . . 34 |
| | | (Kabat Numbering) | |
| H1 | H31-H35 | H26-H35 | H26-H32 |
| | | (Chothia Numbering) | |
| H2 | H50-H65 | H50-H58 | H52-H56 |
| H3 | H95-H102 | H95-H102 | H95-H102 |

[0341] The Kabat numbering of residues can be determined for a given antibody by alignment at regions of homology of the sequence of the antibody with a “standard” Kabat numbered sequence. Chothia refers instead to the location of the structural loops (Chothia and Lesk, J. Mol. Biol. 196:901-917 (1987)). The end of the Chothia CDR-H1 loop when numbered using the Kabat numbering convention varies between H32 and H34 depending on the length of the loop (this is because the Kabat numbering scheme places the insertions at H35A and H35B; if neither 35A nor 35B is present, the loop ends at 32; if only 35A is present, the loop ends at 33; if both 35A and 35B are present, the loop ends at 34). The AbM hypervariable regions represent a compromise between the Kabat CDRs and Chothia structural loops, and are used by Oxford Molecular's AbM antibody modeling software.

[0342] IMGT (ImMunoGeneTics) also provides a numbering system for the immunoglobulin variable regions, including the CDRs. See e.g., Lefranc, M. P. et al., Dev. Comp. Immunol. 27: 55-77(2003), which is herein incorporated by reference. The IMGT numbering system was based on an alignment of more than 5,000 sequences, structural data, and characterization of hypervariable loops and allows for easy comparison of the variable and CDR regions for all species. According to the IMGT numbering schema VH-CDR1 is at positions 26 to 35, VH-CDR2 is at positions 51 to 57, VH-CDR3 is at positions 93 to 102, VL-CDR1 is at positions 27 to 32, VL-CDR2 is at positions 50 to 52, and VL-CDR3 is at positions 89 to 97.

[0343] For all heavy chain constant region amino acid positions discussed in the present invention, numbering is according to the EU index first described in Edelman et al., 1969, Proc. Natl. Acad. Sci. USA 63(1):78-85, describing the amino acid sequence of myeloma protein EU, which is the first human lgG1 sequenced. The EU index of Edelman et al. is also set forth in Kabat et al., 1991, Sequences of Proteins of Immunological Interest, 5th Ed., United States Public Health Service, National Institutes of Health, Bethesda. Thus, the phrases “EU index as set forth in Kabat” or “EU index of Kabat” and “position . . . according to the EU index as set forth in Kabat,” and grammatical variants thereof refer to the residue numbering system based on the human igG1 EU antibody of Edelman et al. as set forth in Kabat 1991.

[0344] The numbering system used for the variable domains (both heavy chain and light chain) and light chain constant region amino acid sequence is that set forth in Kabat 1991.

[0345] As used herein the Fc region includes the polypeptides comprising the constant region of an antibody excluding the first constant region immunoglobulin domain. Thus Fc refers to the last two constant region immunoglobulin domains of IgA, IgD, and IgG, and the last three constant region immunoglobulin domains of IgE and IgM, and the flexible hinge N-terminal to these domains. For IgA and IgM Fc can include the J chain. For IgG, Fc comprises immunoglobulin domains Cgamma2 and Cgamma3 (Cγ2 and Cγ3) and the hinge between Cgamma1 (Cγ1) and Cgamma2 (Cγ2).

[0346] Although the boundaries of the Fc region can vary, the human IgG heavy chain Fc region is usually defined to comprise residues C226 or P230 to its carboxyl-terminus, wherein the numbering is according to the EU index as set forth in Kabat. Fc can refer to this region in isolation, or this region in the context of an antibody, antibody fragment, or Fc fusion protein.

[0347] Polymorphisms have been observed at a number of different positions within antibody constant regions (e.g., Fc positions, including but not limited to positions 270, 272, 312, 315, 356, and 358 as numbered by the EU index as set forth in Kabat), and thus slight differences between the presented sequence and sequences in the prior art can exist. Polymorphic forms of human immunoglobulins have been well-characterized. At present, 18 Gm allotypes are known: G1m (1, 2, 3, 17) or G1m (a, x, f, z), G2m (23) or G2m (n), G3m (5, 6, 10, 11, 13, 14, 15, 16, 21, 24, 26, 27, 28) or G3m (b1, c3, b3, b0, b3, b4, s, t, g1, c5, u, v, g5). See Lefranc, et al., The human IgG subclasses: molecular analysis of structure, function and regulation. Pergamon, Oxford, pp. 43-78 (1990); Lefranc et al. (1979) Hum. Genet.: 50, 199-211. It is specifically contemplated that the antibodies of the present invention may be incorporate any allotype, isoallotype, or haplotype of any immunoglobulin gene, and are not limited to the allotype, isoallotype or haplotype of the sequences provided herein.

[0348] Antibody binding site: The term “antibody binding site” refers to a region in the antigen (e.g., FIXa or FXz) comprising a continuous or discontinuous site (i.e., an epitope) to which a complementary antibody specifically binds. Thus, the antibody binding site can contain additional areas in the antigen which are beyond the epitope and which can determine properties such as binding affinity and/or stability, or affect properties such as antigen enzymatic activity or dimerization. Accordingly, even if two antibodies bind to the same epitope within an antigen, if the antibody molecules establish distinct intermolecular contacts with amino acids outside of the epitope, such antibodies are considered to bind to distinct antibody binding sites.

[0349] Antigen binding portion: As used herein the term “antigen binding portion” can be interchangeably used with “antigen binding fragment” and refers to a portion of an intact antibody capable of specific binding to the same epitope as the intact antibody. In particular, it refers to a portion or portions of an intact antibody comprising one or more CDRs of an intact antibody. It is known in the art that the antigen binding function of an antibody can be performed by fragments of a full-length antibody. Examples of antibody fragments include, but are not limited to Fab, Fab′, F(ab′)2, and Fv fragments, linear antibodies, single chain antibodies, and multispecific antibodies formed from antibody fragments.

[0350] Antigen binding molecule: The terms “antigen binding molecule” and “binding molecule” are used interchangeable in the present disclosure and encompass antibodies as defined herein, as well as other molecular entities comprising at least one of the CDRs of the antibodies disclosed herein which are capable of binding to the same epitopes. For example, the term includes antibody mimics based on the scaffold of the fibronectin type III domain (monobodies), other scaffolding systems (e.g., tenascin) in which one or more CDRs are grafted, aptamers, etc. In some aspects, the antigen binding molecule can be bispecific, i.e., a “bispecific binding molecule” or a “bispecific molecule”.

[0351] Approximately: As used herein, the term “approximately,” as applied to one or more values of interest, refers to a value that is similar to a stated reference value. In certain embodiments, the term “approximately” refers to a range of values that fall within 10%, 9%, 8%, 7%, 6%, 5%, 4%, 3%, 2%, 1%, or less in either direction (greater than or less than) of the stated reference value unless otherwise stated or otherwise evident from the context (except where such number would exceed 100% of a possible value).

[0352] Associated with: As used herein with respect to a disease, the term “associated with” means that the symptom, measurement, characteristic, or status in question is linked to the diagnosis, development, presence, or progression of that disease. As association may, but need not, be causatively linked to the disease.

[0353] When used with respect to two or more moieties, the terms “associated with,” “conjugated,” “linked,” “attached,” and “tethered,” when used with respect to two or more moieties, means that the moieties are physically associated or connected with one another, either directly or via one or more additional moieties that serves as a linking agent, to form a structure that is sufficiently stable so that the moieties remain physically associated under the conditions in which the structure is used, e.g., physiological conditions. An “association” need not be strictly through direct covalent chemical bonding. It may also suggest ionic or hydrogen bonding or a hybridization based connectivity sufficiently stable such that the “associated” entities remain physically associated.

[0354] Binding affinity: “Binding affinity” generally refers to the strength of the sum total of non-covalent interactions between a single binding site of a molecule (e.g., an antibody) and its binding partner (e.g., an antigen). Unless indicated otherwise, as used herein, “binding affinity” refers to intrinsic binding affinity which reflects a 1:1 interaction between members of a binding pair (e.g., antibody and antigen). The affinity of a molecule X for its partner Y can generally be represented by the dissociation constant (K_{D}). Affinity can be measured by common methods known in the art, including those described herein. Low-affinity antibodies generally bind antigen slowly and tend to dissociate readily, whereas high-affinity antibodies generally bind antigen faster and tend to remain bound longer. A variety of methods of measuring binding affinity are known in the art, any of which can be used for purposes of the present disclosure.

[0355] The terms “higher binding affinity” or “greater affinity” as applied to any of the antibodies of the invention refer to increased binding affinity (as measured, for example, by the K_{D}) with respect to a reference antibody. In some embodiments, the reference antibody is an corresponding antibody that has not been affinity matured. In some embodiments, the reference antibody is another antibody with the same specificity (e.g., for an anti-FIXa disclosed herein, a reference antibody could be another anti-FIX or anti-FIXa antibody known in the art). In some embodiments, increased binding affinity can be for example, at least about 10%, at least about 20%, at least about 30%, at least about 40%, at least about 50%, at least about 60%, at least about 70%, at least about 80%, at least about 90%, or at least about 100% higher than the binding affinity of the reference antibody for the same coagulation factor (e.g., FIX or FX), form of the factor (e.g., FIXa or FXz), or antigen binding site (e.g., epitope). In some embodiments, increased binding affinity can be for example, at least about 2-fold, at least about 3-fold, at least about 4-fold, at least about 5-fold, at least about 6-fold, at least about 7-fold, at least about 8-fold, at least about 9-fold, or at least about 10-fold higher than the binding affinity of the reference antibody for the same coagulation factor (e.g., FIX or FX), form of the factor (e.g., FIXa or FXz), or antigen binding site (e.g., epitope).

[0356] Binding: The term “binding” refers to a physical interaction between two molecules, for example, an antibody and an antigen.

(i) Binding specificity: The term “specificity” refers to the ability of an binding molecule, e.g., an antibody, to bind preferentially to one antigenic site (e.g., an epitope) versus a different antigenic site and does not necessarily imply high affinity. The terms “binding specificity” and “specificity” are used interchangeably and can refer both to (i) a specific portion of a binding molecule and (ii) the ability of the binding molecule to specifically bind (see definition of “specific binding” below) to a particular epitope. For example, in some embodiments, a bispecific antibody disclosed herein comprises two binding specificities, a first binding specificity for example to FIXa and a second binding specificity for example to FXz (in this context, a “binding specificity” such as a specific region of a bispecific antibody binding to the a particular antigenic determinant would be equivalent to a “binding domain”).
(ii) Specific binding: An binding molecule, e.g., an antibody, “specifically binds” when there is an immunological reaction of specific interaction between an antigen and the binding molecule. The term “specifically binds” means that the antibody has been generated to bind to the antigen through its variable region. The term “non-specific binding” means that the antibody has not been generated to specifically bind to the antigen but does somehow bind the antigen through non-specific means. As one example, an antibody will non-specifically bind to an Fc receptor through the Fc portion of the antibody molecule. As another example, certain antibodies may inadvertently cross-react with antigens to which they were not generated.
(iii) Preferential binding: A binding molecule, e.g., an antibody, “preferentially binds” to an antigen if it binds with greater affinity, avidity, more readily, and/or with greater duration than it binds to other substances. For example, an antibody that preferentially binds to an FIXa epitope is an antibody that binds this epitope with greater affinity, avidity, more readily, and/or with greater duration than it binds to other FIXa epitopes or non-FIXa epitopes. For example, an anti-FIX antibody preferentially binds to activated FIX over FIX zymogen if more than 50%, 60%, 70%, 80%, 90%, or 95% of the anti-FIX antibody binds to FIXa in the presence of both FIXa and FIXz. It is also understood by reading this definition that, for example, an antibody (or moiety or epitope) that preferentially binds to a first target may or may not preferentially bind to a second target. As such, “preferential binding” does not necessarily require (although it can include) exclusive binding. Thus, in some aspects, “preferential binding” can be “exclusive binding.” To exemplify these concepts, if 50% of an anti-FIX specifically binds to FIX zymogen and 50% specifically binds to FIXa, such binding would be “non-selective” or “non-preferential.” If less than 50% of the anti-FIX binds to FIX zymogen and more than 50% binds to FXa, the anti-FIX would “preferentially bind” to FIXa. If the anti-FIX does not bind to FIX zymogen and only binds to FIXa, the anti-FIX would “exclusively bind” to FIXa.

[0357] Biological sample: The term “biological sample” as used herein refers to any sample obtained from an subject, cell line, tissue culture, or other source potentially comprising a molecule comprising an antigen specifically recognized by the binding molecules disclosed herein. In some aspects, the biological sample is a blood sample, or a sample derived from a blood sample (e.g., plasma). Methods for obtaining tissue biopsies and body fluids from mammals are well known in the art.

[0358] Bispecific antibody: A “bispecific antibody” is a particular type of “bispecific molecule” or “bispecific binding molecule.” The term “bispecific antibody” means an antibody that is able to bind to at least two antigenic determinants (e.g., epitopes) through two different antigen binding sites. In certain embodiments, the bispecific antibody is capable of concurrently binding two antigenic determinants (e.g., epitopes). In some embodiments, a bispecific antibody binds one antigen (or epitope) on one of its binding arms (one pair of heavy chain/light chain), and binds a different antigen (or epitope) on its second binding arm (a different pair of heavy chain/light chain). In some embodiments, a bispecific antibody can have two distinct antigen binding arms (in both specificity and CDR sequences), and is monovalent for each antigen to which it binds. Bispecific antibodies include, e.g., those generated by quadroma technology (Milstein & Cuello (1983) Nature 305(5934):537-40), by chemical conjugation of two different monoclonal antibodies (Staerz et al. (1985) Nature 314(6012):628-31), or by knob-into-hole or similar approaches which introduces mutations in the Fc region (Holliger et al. (1993) Proc. Natl. Acad. Sci. U.S.A. 90(14): 6444-6448).

[0359] A wide variety of recombinant bispecific antibody formats have been developed in the recent past, e.g. by fusion of, e.g. an IgG antibody format and single chain domains (see Kontermann R E, mAbs 4:2, (2012) 1-16). Bispecific antibodies wherein the variable domains VL and VH or the constant domains CL and CH1 are replaced by each other are described in WO2009080251 and WO2009080252.

[0360] An approach to circumvent the problem of mispaired byproducts, which is known as ‘knobs-into-holes’, aims at forcing the pairing of two different antibody heavy chains by introducing mutations into the CH3 domains to modify the contact interface. On one chain bulky amino acids were replaced by amino acids with short side chains to create a ‘hole’. Conversely, amino acids with large side chains were introduced into the other CH3 domain, to create a ‘knob’. By coexpressing these two heavy chains (and two identical light chains, which have to be appropriate for both heavy chains), high yields of heterodimer formation (‘knob-hole’) versus homodimer formation (‘hole-hole’ or ‘knob-knob’) was observed (Ridgway J B, Presta L G, Carter P; and WO1996027011). The percentage of heterodimer could be further increased by remodeling the interaction surfaces of the two CH3 domains using a phage display approach and the introduction of a disulfide bridge to stabilize the heterodimers (Merchant A. M, et al, Nature Biotech 16 (1998) 677-681; Anwell S, Ridgway J B, Wells J A, Carter P., J Mol Biol 270 (1997) 26-35). New approaches for the knobs-into-holes technology are described in e.g. in EP 1870459A1. Xie, Z., et al, J Immunol Methods 286 (2005) 95-101 refers to a format of bispecific antibody using scFvs in combination with knobs-into-holes technology for the FC part.

[0361] The modular architecture of antibodies has been exploited to create more than 60 different bispecific antibody formats. See Spiess et al. (2015) Molecular Immunology 67:95-106, which is herein incorporated by reference in its entirety. Accordingly, in some aspects, the bispecific antibody format is selected from crossMab, DAF (Dual Action Fab) (two-in-one), DAF (four-in-one), DutaMab, DT-IgG, Knobs-in-holes common LC, Knobs-in-holes assembly, Charge pair, Fab-arm exchange, SEEDbody, Triomab, LUZ-Y (bispecific antibody with a leucize zipper inducing heterodimerization of two HCs), Fcab, Kλ-body, Orthogonal Fab, DVD-IgG (dual variable domain IgG), IgG(H)-scFv, scFv-(H)IgG, IgG(L)-scFv, scFv-(L)IgG, IgG(L,H)-Fv, IgG(H)-V, V(H)-IgG, IgG(L)-V, V(L)-IgG, KIH IgG-scFab, 2scFv-IgG, IgG-2scFv, scFv4-Ig, Zybody, DVI-IgG (four-in-one), Nanobody, Nanobody-HSA, BiTE (bispecific T cell engager), Diabody, DART (dual-affinity-retargeting), TandAb (tandem antibody), scDiabody, scDiabody-CH3, Triple Body, Miniantibody, Minibody, TriBi minibody, scFv-CH3 KIH, Fab-scFv, scFv-CH-CL-scFv, F(ab′)2, F(ab′)2-ScFv2, scFv-KIH, Fab-scFv-Fc, Tetravalent HC Ab, scDiabody-Fc, Diabody-Fc, Tandem scFv-Fc, Intrabody, Dock and Locck, ImmTAC, HSAbody, scDiabody-HSA, Tandem scFv-Toxin, IgG-IgG, Cov-X-Body, and scFv1-PEG-scFV2.

[0362] In some aspects, the bispecific antibody is an asymmetric (e.g., heterdimeric) antibody, comprising a chain A and a chain B, wherein
[0363] (i) Chain A comprises a T336W mutation, and chain B comprises T366W, L368A, and Y407V mutations (Knows-in holes format);
[0364] (ii) Chain A comprises a F405L mutation, and chain B comprises a K409R mutation (duobody format);
[0365] (iii) Chain A comprises T350V, L351Y, F405A, and Y407V mutations, and chain B comprises T350V, T366L, K392L and T394W mutations (azymetric format);
[0366] (iv) Chain A comprises K409D and K392D mutations, and chain B comprises D399K and E356K mutations (Charge pair format);
[0367] (v) Chain A comprises D221E, P228E, and L368E mutations, and chain B comprises D221R, P228R and K409R mutations (Charge pair format);
[0368] (vi) Chain A comprises S364H and F405A mutations, and chain B comprises Y349T and T394F mutations (HA-TF format); or,
[0369] (vii) Chain A comprises an IgG/A chimera, and chain B also comprises an IgG/A chimera (SEEDbody format).

[0370] In some aspects, the bispecific antibody is a monospecific antibody engineered for bispecificity by appending either the amino or carboxy termini of either the light or heavy chains with additional antigen-binding units. Alternatives for these additional antigen-binding units include single domain antibodies (unpaired VL or VH), paired antibody variable domains (e.g., Fv or scFv) or engineered protein scaffolds. In some aspects, a bispecific molecule of the present invention comprises a bispecific antibody fragment. Numerous bispecific fragment forms lacking some or all of the bispecific antibody constant domains are known in the art. In some aspects, the bispecific molecule of the invention is a bispecific fusion protein, e.g., an ImmTAC (scFv linked to an affinity matured receptor). In other aspects, the bispecific molecule is a bispecific antibody conjugate.

[0371] Bispecific molecule: See the definition of “Antigen binding molecule”/“Binding molecule” above.

[0372] Chimeric antibody: The term “chimeric antibody” and grammatical variants thereof refers to antibodies wherein the amino acid sequence of the immunoglobulin molecule is derived from two or more animal species. Typically, the variable region of both light and heavy chains corresponds to the variable region of antibodies derived from one species of mammals (e.g., mouse, rat, rabbit, etc.) with the desired specificity, and/or affinity, and/or capability while the constant regions are homologous to the sequences in antibodies derived from another species (usually human) to avoid eliciting an immune response in that species.

[0373] Complementarity determining region: The term “complementarity determining region” or “CDR” refers to variable regions of either H (heavy) or L (light) chains contains the amino acid sequences capable of specifically binding to antigenic targets. These CDR regions account for the basic specificity of the antibody for a particular antigenic determinant structure. Such regions are also referred to as “hypervariable regions.” See definition of “Antibody” above.

[0374] Conservative amino acid substitution: A “conservative amino acid substitution” is one in which the amino acid residue is replaced with an amino acid residue having a similar side chain. Families of amino acid residues having similar side chains have been defined in the art, including basic side chains (e.g., lysine, arginine, or histidine), acidic side chains (e.g., aspartic acid or glutamic acid), uncharged polar side chains (e.g., glycine, asparagine, glutamine, serine, threonine, tyrosine, or cysteine), nonpolar side chains (e.g., alanine, valine, leucine, isoleucine, proline, phenylalanine, methionine, or tryptophan), beta-branched side chains (e.g., threonine, valine, isoleucine) and aromatic side chains (e.g., tyrosine, phenylalanine, tryptophan, or histidine). Thus, if an amino acid in a polypeptide is replaced with another amino acid from the same side chain family, the amino acid substitution is considered to be conservative. In another aspect, a string of amino acids can be conservatively replaced with a structurally similar string that differs in order and/or composition of side chain family members.

[0375] Non-conservative amino acid substitutions include those in which (i) a residue having an electropositive side chain (e.g., Arg, His or Lys) is substituted for, or by, an electronegative residue (e.g., Glu or Asp), (ii) a hydrophilic residue (e.g., Ser or Thr) is substituted for, or by, a hydrophobic residue (e.g., Ala, Leu, Ile, Phe or Val), (iii) a cysteine or proline is substituted for, or by, any other residue, or (iv) a residue having a bulky hydrophobic or aromatic side chain (e.g., Val, His, Ile or Trp) is substituted for, or by, one having a smaller side chain (e.g., Ala or Ser) or no side chain (e.g., Gly).

[0376] Other amino acid substitutions can be readily identified by workers of ordinary skill. For example, for the amino acid alanine, a substitution can be taken from any one of D-alanine, glycine, beta-alanine, L-cysteine and D-cysteine. For lysine, a replacement can be any one of D-lysine, arginine, D-arginine, homo-arginine, methionine, D-methionine, ornithine, or D-ornithine. Generally, substitutions in functionally important regions that can be expected to induce changes in the properties of isolated polypeptides are those in which (i) a polar residue, e.g., serine or threonine, is substituted for (or by) a hydrophobic residue, e.g., leucine, isoleucine, phenylalanine, or alanine; (ii) a cysteine residue is substituted for (or by) any other residue; (iii) a residue having an electropositive side chain, e.g., lysine, arginine or histidine, is substituted for (or by) a residue having an electronegative side chain, e.g., glutamic acid or aspartic acid; or (iv) a residue having a bulky side chain, e.g., phenylalanine, is substituted for (or by) one not having such a side chain, e.g., glycine. The likelihood that one of the foregoing non-conservative substitutions can alter functional properties of the protein is also correlated to the position of the substitution with respect to functionally important regions of the protein: some non-conservative substitutions can accordingly have little or no effect on biological properties.

[0377] Conserved: As used herein, the term “conserved” refers to nucleotides or amino acid residues of a polynucleotide sequence or polypeptide sequence, respectively, that are those that occur unaltered in the same position of two or more sequences being compared. Nucleotides or amino acids that are relatively conserved are those that are conserved amongst more related sequences than nucleotides or amino acids appearing elsewhere in the sequences.

[0378] In some embodiments, two or more sequences are said to be “completely conserved” or “identical” if they are 100% identical to one another. In some embodiments, two or more sequences are said to be “highly conserved” if they are at least 70% identical, at least 80% identical, at least 90% identical, or at least 95% identical to one another. In some embodiments, two or more sequences are said to be “highly conserved” if they are about 70% identical, about 80% identical, about 90% identical, about 95%, about 98%, or about 99% identical to one another. In some embodiments, two or more sequences are said to be “conserved” if they are at least 30% identical, at least 40% identical, at least 50% identical, at least 60% identical, at least 70% identical, at least 80% identical, at least 90% identical, or at least 95% identical to one another. In some embodiments, two or more sequences are said to be “conserved” if they are about 30% identical, about 40% identical, about 50% identical, about 60% identical, about 70% identical, about 80% identical, about 90% identical, about 95% identical, about 98% identical, or about 99% identical to one another. Conservation of sequence may apply to the entire length of an polynucleotide or polypeptide or may apply to a portion, region or feature thereof.

[0379] Cross-compete: The terms “compete” or “cross-compete”, as used herein with regard to a binding molecule, e.g., an antibody, means that a first binding molecule, e.g., a first antibody or an antigen-binding portion thereof, binds to an epitope in a manner sufficiently similar to the binding of a second binding molecule, e.g., a second antibody or an antigen-binding portion thereof, such that the result of binding of the first binding molecule with its cognate epitope is detectably decreased in the presence of the second binding molecule compared to the binding of the first binding molecule in the absence of the second binding molecule. The alternative, where the binding of the second binding molecule to its epitope is also detectably decreased in the presence of the first binding molecule, can, but need not be the case. That is, a first binding molecule can inhibit the binding of a second binding molecule to its epitope without that second molecule inhibiting the binding of the first binding molecule to its respective epitope. However, where each binding molecule detectably inhibits the binding of the other binding molecule with its cognate epitope, whether to the same, greater, or lesser extent, the binding molecules are said to “cross-compete” with each other for binding of their respective epitope(s). Both competing and cross-competing binding molecules are encompassed by the present invention.

[0380] Binding molecules, e.g., antibodies, are said to “bind to the same epitope” or “comprising the same binding site” or have “essentially the same binding” characteristics, if the binding molecules cross-compete so that only one antibody can bind to the epitope at a given point of time, i.e., one binding molecule prevents the binding or modulating effect of the other.

[0381] Competition herein means a greater relative inhibition than at least about 20%, at least about 25%, at least about 30%, at least about 35%, at least about 40%, at least about 45%, at least about 50%, at least about 55%, at least about 60%, at least about 65%, at least about 70%, at least about 75%, at least about 80%, at least about 85%, at least about 90%, at least about 95%, or about 100% as determined by competition ELISA analysis or by ForteBio analysis, e.g., as described in the Examples section. It may be desirable to set a higher threshold of relative inhibition as criteria of what is a suitable level of competition in a particular context. Thus, for example, it is possible to set criteria for the competitive binding, wherein at least about 40% relative inhibition is detected, or at least about 45%, or at least about 50%, or at least about 55%, or at least about 60%, or at least about 65%, or at least about 70%, or at least about 75%, or at least about 80%, or at least about 85%, or at least about 90%, or at least about 95%, or even about 100%, before an antibody is considered sufficiently competitive.

[0382] Effective Amount: As used herein, the term “effective amount” of an agent, e.g., a therapeutic agent such as an antibody, is that amount sufficient to effect beneficial or desired results, for example, clinical results, and, as such, an “effective amount” depends upon the context in which it is being applied. For example, in the context of administering a therapeutic agent that treats bleeding, an effective amount of an agent is, for example, an amount sufficient to reduce or decrease in bleeding occurrences, as compared to the response obtained without administration of the agent. The term “effective amount” can be used interchangeably with “effective dose,” “therapeutically effective amount,” or “therapeutically effective dose.”

[0383] Effector function: The “effector function” of an antibody is the ability to bind complement proteins which can assist in lysing the target antigen, for example, a cellular pathogen, in a process termed complement-dependent cytotoxicity (CDC). Another effector activity of the Fc region is to bind to Fc receptors (e.g., FcγRs) on the surface of immune cells, or so-called effector cells, which have the ability to trigger other immune effects. The effector function of an antibody can be avoided, e.g., by using antibody fragments lacking the Fc region (e.g., such as a Fab, F(ab′)2, or single chain Fv (scFv)), by removing sugars that are linked to particular residues in the Fc region (aglycosylated antibodies), or by employing Fc regions from an IgG4 antibody (an “effectorless IgG4 Fc”), instead of IgG1. It is well known that IgG4 antibodies are characterized by having lower levels of complement activation and antibody-dependent cellular cytotoxicity than IgG1.

[0384] Engineered antibody: As used herein, embodiments of the invention are “engineered” when they are designed to have a feature or property, whether structural or chemical, that varies from a starting point, wild type, or native molecule. In this respect, an “engineered antibody” is, for example, an antibody in which substitutions/mutations have been made to improve affinity, plasma half-life, etc., the format of the antibody has been modified (e.g., by generating an scFv or a bispecific antibody), or the antibody has been subjected to affinity maturation.

[0385] Epitope: The term “epitope” as used herein refers to an antigenic protein determinant (e.g., an amino acid subsequence of FIXa or FXz) capable of binding to a binding molecule, e.g., an antibody. Epitopes usually consist of chemically active surface groupings of molecules such as amino acids or sugar side chains and usually have specific three dimensional structural characteristics, as well as specific charge characteristics. The part of an antibody or binding molecule that recognizes the epitope is called a paratope. The epitopes of protein antigens are divided into two categories, conformational epitopes and linear epitopes, based on their structure and interaction with the paratope. A conformational epitope is composed of discontinuous sections of the antigen's amino acid sequence. These epitopes interact with the paratope based on the 3-D surface features and shape or tertiary structure of the antigen. By contrast, linear epitopes interact with the paratope based on their primary structure. A linear epitope is formed by a continuous sequence of amino acids from the antigen.

[0386] Expression vector: An “expression vector” is a polynucleotide which, when introduced into an appropriate host cell, can be transcribed and translated into a polypeptide. An “expression system” usually refers to a suitable host cell comprised of an expression vector that can function to yield a desired expression product. The antibodies (e.g., bispecific antibodies) according to the invention are preferably produced by recombinant means. Such methods are widely known in the state of the art and comprise protein expression in prokaryotic and eukaryotic cells with subsequent isolation of the antibody polypeptide and usually purification to a pharmaceutically acceptable purity.

[0387] Germline sequence: As used herein, the term “germline sequence” refers to a sequence of unrearranged immunoglobulin DNA sequences. Any suitable source of unrearranged immunoglobulin may be used. The term “germline” refers to the sequences of the V, D, and J minigenes, prior to the exposure of an antibody to an antigen. Rearranged “V-regions” describe the genetic element which results from the rearrangement event between V, D, and J (for heavy chains) or V and J minigenes (for light chains). An “antibody V-region” refers to the polypeptide region encoded by the V, D, and J element. An antibody V-region is encoded by rearranged V, D, and J minigenes. The term “V(D)J Recombination” refers to any process wherein a V, D, or J minigene is recombined to another V, D, or J minigene. A V-region may be part of a full length antibody, an Fab, a scFv, or any other derivative of an antibody (see definition of antibody below). A “germline V-region” refers to the sequence of rearranged V, D, and J minigenes prior to significant mutagenic events. A germline V-region may have random insertions or deletions at the junctions of the V-D, D-J, or V-J minigenes. A non-germline V-region (or a “mature” V-region) will differ from the germline sequences of the minigenes by usually more than 5 residues (not including the junctional deletions or insertions).

[0388] Homology: As used herein, the term “homology” refers to the overall relatedness between polymeric molecules, e.g. between nucleic acid molecules (e.g. DNA molecules and/or RNA molecules) and/or between polypeptide molecules. Generally, the term “homology” implies an evolutionary relationship between two molecules. Thus, two molecules that are homologous will have a common evolutionary ancestor. In the context of the present invention, the term homology encompasses both to identity and similarity.

[0389] In some embodiments, polymeric molecules are considered to be “homologous” to one another if at least 25%, 30%, 35%, 40%, 45%, 50%, 55%, 60%, 65%, 70%, 75%, 80%, 85%, 90%, 95%, or 99% of the monomers in the molecule are identical (exactly the same monomer) or are similar (conservative substitutions). The term “homologous” necessarily refers to a comparison between at least two sequences (polynucleotide or polypeptide sequences).

[0390] Human antibody: The term “human antibody” means an antibody produced by a human or an antibody having an amino acid sequence corresponding to an antibody produced by a human made using any technique known in the art (e.g., recombinant expression in cultures cells, or expression in transgenic animals). Thus, the term human antibody also encompasses an antibody having an amino acid sequence corresponding to an antibody originally produced by a human (or an engineered variant or derivative thereof) but expressed in a non-human system (e.g., produced by chemical synthesis; recombinantly expressed in microbial, mammal, or insect cells; or expressed in an animal subject). Accordingly, an antibody obtained from a human subject or from human cells (e.g., hybridoma or cell line expressing a recombinant antibody or fragment thereof) and subsequently expressed in an animal, e.g., mice, is considered a human antibody. This definition of a human antibody includes intact or full-length antibodies, fragments thereof, and/or antibodies comprising at least one human heavy and/or light chain polypeptide such as, for example, an antibody comprising murine light chain and human heavy chain polypeptides.

[0391] Humanized antibody: The term “humanized antibody” refers to an antibody derived from a non-human (e.g., murine) immunoglobulin, which has been engineered to contain minimal non-human (e.g., murine) sequences. Typically, humanized antibodies are human immunoglobulins in which residues from the CDRs are replaced by residues from the CDRs of a non-human species (e.g., mouse, rat, rabbit, or hamster) that have the desired specificity, affinity, and capability (Jones et al., 1986, Nature, 321:522-525; Riechmann et al., 1988, Nature, 332:323-327; Verhoeyen et al., 1988, Science, 239:1534-1536). In some instances, the FW residues of a human immunoglobulin are replaced with the corresponding residues in an antibody from a non-human species that has the desired specificity, and/or affinity, and/or capability.

[0392] The humanized antibody can be further modified by the substitution of additional residues either in the FW regions and/or within the replaced non-human residues to refine and optimize antibody specificity, and/or affinity, and/or capability. In general, the humanized antibody will comprise substantially all of at least one, and typically two or three, variable domains containing all or substantially all of the CDR regions that correspond to the non-human immunoglobulin whereas all or substantially all of the FW regions are those of a human immunoglobulin consensus sequence. The humanized antibody can also comprise at least a portion of an immunoglobulin constant region or domain (Fc), typically that of a human immunoglobulin. Examples of methods used to generate humanized antibodies are described in U.S. Pat. Nos. 5,225,539 or 5,639,641.

[0393] Identity: As used herein, the term “identity” refers to the overall monomer conservation between polymeric molecules, e.g., between polypeptide molecules or polynucleotide molecules (e.g. DNA molecules and/or RNA molecules). The term “identical” without any additional qualifiers, e.g., protein A is identical to protein B, implies the sequences are 100% identical (100% sequence identity). Describing two sequences as, e.g., “70% identical,” is equivalent to describing them as having, e.g., “70% sequence identity.”

[0394] Calculation of the percent identity of two polynucleotide sequences, for example, can be performed by aligning the two sequences for optimal comparison purposes (e.g., gaps can be introduced in one or both of a first and a second nucleic acid sequences for optimal alignment and non-identical sequences can be disregarded for comparison purposes). In certain embodiments, the length of a sequence aligned for comparison purposes is at least 30%, at least 40%, at least 50%, at least 60%, at least 70%, at least 80%, at least 90%, at least 95%, or 100% of the length of the reference sequence. The nucleotides at corresponding nucleotide positions are then compared. When a position in the first sequence is occupied by the same nucleotide as the corresponding position in the second sequence, then the molecules are identical at that position. The percent identity between the two sequences is a function of the number of identical positions shared by the sequences, taking into account the number of gaps, and the length of each gap, which needs to be introduced for optimal alignment of the two sequences. The comparison of sequences and determination of percent identity between two sequences can be accomplished using a mathematical algorithm. When comparing DNA and RNA, thymine (T) and uracil (U) can be considered equivalent.

[0395] Suitable software programs are available from various sources, and for alignment of both protein and nucleotide sequences. One suitable program to determine percent sequence identity is bl2seq, part of the BLAST suite of program available from the U.S. government's National Center for Biotechnology Information BLAST web site (blast.ncbi.nlm.nih.gov). Bl2seq performs a comparison between two sequences using either the BLASTN or BLASTP algorithm. BLASTN is used to compare nucleic acid sequences, while BLASTP is used to compare amino acid sequences. Other suitable programs are, e.g., Needle, Stretcher, Water, or Matcher, part of the EMBOSS suite of bioinformatics programs and also available from the European Bioinformatics Institute (EBI) at www.ebi.ac.uk/Tools/psa.

[0396] Sequence alignments can be conducted using methods known in the art such as MAFFT, Clustal (ClustalW, Clustal X or Clustal Omega), MUSCLE, etc.

[0397] Different regions within a single polynucleotide or polypeptide target sequence that aligns with a polynucleotide or polypeptide reference sequence can each have their own percent sequence identity. It is noted that the percent sequence identity value is rounded to the nearest tenth. For example, 80.11, 80.12, 80.13, and 80.14 are rounded down to 80.1, while 80.15, 80.16, 80.17, 80.18, and 80.19 are rounded up to 80.2. It also is noted that the length value will always be an integer.

[0398] In certain aspects, the percentage identity (% ID) or of a first amino acid sequence (or nucleic acid sequence) to a second amino acid sequence (or nucleic acid sequence) is calculated as % ID=100×(Y/Z), where Y is the number of amino acid residues (or nucleobases) scored as identical matches in the alignment of the first and second sequences (as aligned by visual inspection or a particular sequence alignment program) and Z is the total number of residues in the second sequence. If the length of a first sequence is longer than the second sequence, the percent identity of the first sequence to the second sequence will be higher than the percent identity of the second sequence to the first sequence.

[0399] One skilled in the art will appreciate that the generation of a sequence alignment for the calculation of a percent sequence identity is not limited to binary sequence-sequence comparisons exclusively driven by primary sequence data. It will also be appreciated that sequence alignments can be generated by integrating sequence data with data from heterogeneous sources such as structural data (e.g., crystallographic protein structures), functional data (e.g., location of mutations), or phylogenetic data. A suitable program that integrates heterogeneous data to generate a multiple sequence alignment is T-Coffee, available at www.tcoffee.org, and alternatively available, e.g., from the EBI. It will also be appreciated that the final alignment used to calculate percent sequence identity can be curated either automatically or manually.

[0400] Immunoconjugate: The term “immunoconjugate” as used herein refers to a compound comprising a binding molecule (e.g., an anti-FIXa, anti-FXz, or biospecific anti-FIXa/anti-FXz) and one or more moieties, e.g., therapeutic or diagnostic moieties, chemically conjugated to the binding molecule. In general an immunoconjugate is defined by a generic formula: A-(L-M)n wherein A is a binding molecule (e.g., an antibody), L is an optional linker, and M is a heterologous moiety which can be for example a therapeutic agent, a detectable label, etc., and n is an integer. Immunoconjugates can also be defined by the generic formula in reverse order. In some aspects, the immunoconjugate is an “antibody-Drug Conjugate” (“ADC”). In the context of the present disclosure the term “immunoconjugate” is not limited to chemically or enzymatically conjugates molecules. The term “immunoconjugate” as used in the present disclosure also includes genetic fusions.

[0401] Isolated: As used herein, the term “isolated” refers to a substance or entity (e.g., polypeptide, antibody, polynucleotide, vector, cell, or composition which is in a form not found in nature) that has been separated from at least some of the components with which it was associated (whether in nature or in an experimental setting). Isolated substances (e.g., nucleotide sequence or protein sequence) can have varying levels of purity in reference to the substances from which they have been associated.

[0402] Isolated substances and/or entities can be separated from at least about 10%, at least about 15%, at least about 20%, at least 25%, at least about 30%, at least about 35%, at least about 40%, at least about 45%, at least about 50%, at least about 55%, at least about 60%, at least about 65%, at least about 70%, at least about 75%, at least about 80%, at least about 85%, at least about 90%, at least 95%, or more of the other components with which they were initially associated.

[0403] In some embodiments, isolated agents are more than about 80%, about 85%, about 90%, about 91%, about 92%, about 93%, about 94%, about 95%, about 96%, about 97%, about 98%, about 99%, or more than about 99% pure.

[0404] As used herein, a substance is “pure” if it is substantially free of other components. The term “substantially isolated” means that the compound is substantially separated from the environment in which it was formed or detected. Partial separation can include, for example, a composition enriched in the compound of the present disclosure. Substantial separation can include compositions containing at least about 30%, at least about 35%, at least about 40%, at least about 45%, at least about 50%, at least about 55%, at least about 60%, at least about 65%, at least about 70%, at least about 75%, at least about 80%, at least about 85%, at least about 90%, at least about 95%, at least about 97%, or at least about 99% by weight of the compound of the present disclosure, or salt thereof.

[0405] A polynucleotide (e.g., an antibody), vector, polypeptide, cell, or any composition disclosed herein which is “isolated” is a polynucleotide (e.g., an antibody), vector, polypeptide, cell, or composition which is in a form not found in nature. Isolated polynucleotides, vectors, polypeptides, or compositions include those which have been purified to a degree that they are no longer in a form in which they are found in nature. In some aspects, a polynucleotide, vector, polypeptide, or composition which is isolated is substantially pure.

[0406] Mimic FVIIIa activity: The ability of a binding molecule disclosed herein to “mimic FVIIIa activity,” i.e., the ability to mimic the activity of activated factor VIII, can be measured according to different methods known in the art. One such method is a chromogenic assay as described in the Examples section of this specification. In one aspect, a binding molecule disclosed herein (e.g., a bispecific antibody) is said to “mimic FVIIIa activity” is there is an observed rate of FXa substrate cleavage at least three standard deviations above the mean basal rate in the absence of the added binding molecule (e.g., a bispecific antibody). Another exemplary method is an activated Partial Thromboplastin Time (aPTT) assay. The term ‘Activated Partial Thromboplastin Time (APTT)’ derives from the original form of the test (devised in 1953) in which only the phospholipid concentration of the test was controlled (as opposed to the phospholipid and the surface activator concentrations) and the name ‘partial thromboplastin’ was applied at the time to phospholipid preparations which accelerated clotting but did not correct the prolonged clotting times of haemophilic plasma. Essentially the term ‘partial’ means phospholipid is present but no Tissue Factor. The aPIT is also known as: Kaolin Cephalin Clotting Time (KCCT) or Partial Thromboplastin Time with Kaolin (PTTK). Other useful methods include a one stage (OS) clotting assay which is modified from the traditional aPIT assay described above. The one stage clotting assay uses FVIII-deficient plasma and a diluted test sample, and can be quantitative for FVIII activity. See Example 4. In contrast, the aPTT assay uses sample plasma with the aPIT reagent and calcium and reports the clotting time.

[0407] Monoclonal Antibody: A “monoclonal antibody” refers to a homogeneous antibody population involved in the highly specific recognition and binding of a single antigenic determinant, or epitope. This is in contrast to polyclonal antibodies that typically include different antibodies directed against different antigenic determinants. The term “monoclonal antibody” encompasses both intact and full-length monoclonal antibodies as well as antibody fragments (such as Fab, Fab′, F(ab′)2, Fv), single chain variable fragments (scFv), fusion proteins comprising an antibody portion, and any other modified immunoglobulin molecule comprising an antigen recognition site. Furthermore, “monoclonal antibody” refers to such antibodies made in any number of ways including, but not limited to, by hybridoma, phage selection, recombinant expression, and transgenic animals (e.g., expression of a human antibody in a transgenic mouse).

[0408] Mutation: In the content of the present disclosure, the terms “mutation” and “amino acid substitution” as defined above (sometimes referred simply as a “substitution”) are considered interchangeable. In some aspects, the term mutation refers to the deletion, insertion, or substitution of any nucleotide, by chemical, enzymatic, or any other means, in a nucleic acid encoding an antibody germline gene such that the amino acid sequence of the resulting polypeptide is altered at one or more amino acid residues. In some aspects, a mutation in a nucleic acid sequence disclosed herein results in an amino acid substitution. In other aspects, the mutation of a codon in a nucleic acid sequence disclosed herein wherein the resulting codon is a synonymous codon does not result in an amino acid substitution. Accordingly, in some aspects, the nucleic acid sequences disclosed herein can be codon optimized by introducing one or more synonymous codon changes. Such codon optimization can, for example, (i) improve protein yield in recombinant protein expression, or (ii) improve the stability, half life, or other desirable property of an mRNA or a DNA encoding a binding molecule disclosed herein, wherein such mRNA or DNA is administered to a subject in need thereof.

[0409] Patient: As used herein, “patient” refers to a subject who may seek or be in need of treatment, requires treatment, is receiving treatment, will receive treatment, or a subject who is under care by a trained professional for a particular disease or condition.

[0410] Pharmaceutical composition: The term “pharmaceutical composition” refers to a preparation which is in such form as to permit the biological activity of the active ingredient (e.g., a binding molecule disclosed herein, such as an antibody) to be effective, and which contains no additional components which are unacceptably toxic to a subject to which the composition would be administered. Such composition can be sterile.

[0411] Pharmaceutically acceptable: The phrase “pharmaceutically acceptable” is employed herein to refer to those compounds, materials, compositions, and/or dosage forms that are, within the scope of sound medical judgment, suitable for use in contact with the tissues of human beings and animals without excessive toxicity, irritation, allergic response, or other problem or complication, commensurate with a reasonable benefit/risk ratio. In general, approval by a regulatory agency of the Federal or state governments (or listed in the U.S. Pharmacopeia or other generally recognized pharmacopeia) for use in animals, and more particularly in humans implies that those compounds, materials, compositions, and/or dosage forms are pharmaceutically acceptable. Compounds, materials, compositions, and/or dosage forms that are generally acceptable as safe for therapeutically purposes are “therapeutically acceptable.” Compounds, materials, compositions, and/or dosage forms that are generally acceptable as safe for diagnostic purposes are “diagnostically acceptable.”

[0412] Pharmaceutically acceptable excipients: The phrase “pharmaceutically acceptable excipient,” as used herein, refers any ingredient other than the compounds described herein (for example, a vehicle capable of suspending or dissolving the active compound) and having the properties of being substantially nontoxic and non-inflammatory in a patient. Excipients can include, for example: antiadherents, antioxidants, binders, coatings, compression aids, disintegrants, dyes (colors), emollients, emulsifiers, fillers (diluents), film formers or coatings, flavors, fragrances, glidants (flow enhancers), lubricants, preservatives, printing inks, sorbents, suspensing or dispersing agents, sweeteners, and waters of hydration. Exemplary excipients include, but are not limited to: butylated hydroxytoluene (BHT), calcium carbonate, calcium phosphate (dibasic), calcium stearate, croscarmellose, crosslinked polyvinyl pyrrolidone, citric acid, crospovidone, cysteine, ethylcellulose, gelatin, hydroxypropyl cellulose, hydroxypropyl methylcellulose, lactose, magnesium stearate, maltitol, mannitol, methionine, methylcellulose, methyl paraben, microcrystalline cellulose, polyethylene glycol, polyvinyl pyrrolidone, povidone, pregelatinized starch, propyl paraben, retinyl palmitate, shellac, silicon dioxide, sodium carboxymethyl cellulose, sodium citrate, sodium starch glycolate, sorbitol, starch (corn), stearic acid, sucrose, talc, titanium dioxide, vitamin A, vitamin E, vitamin C, and xylitol.

[0413] Excipients that are generally accepted as safe for therapeutic purposes are “therapeutically acceptable excipients.” Excipients that are generally accepted as safe for diagnostic purposes are “diagnostically acceptable excipients.”

[0414] Pharmaceutically acceptable salts: The present disclosure also includes pharmaceutically acceptable salts of the compounds described herein. As used herein, “pharmaceutically acceptable salts” refers to derivatives of the disclosed compounds wherein the parent compound is modified by converting an existing acid or base moiety to its salt form (e.g., by reacting the free base group with a suitable organic acid). Examples of pharmaceutically acceptable salts include, but are not limited to, mineral or organic acid salts of basic residues such as amines; alkali or organic salts of acidic residues such as carboxylic acids; and the like. Representative acid addition salts include acetate, acetic acid, adipate, alginate, ascorbate, aspartate, benzenesulfonate, benzene sulfonic acid, benzoate, bisulfate, borate, butyrate, camphorate, camphorsulfonate, citrate, cyclopentanepropionate, digluconate, dodecylsulfate, ethanesulfonate, fumarate, glucoheptonate, glycerophosphate, hemisulfate, heptonate, hexanoate, hydrobromide, hydrochloride, hydroiodide, 2-hydroxy-ethanesulfonate, lactobionate, lactate, laurate, lauryl sulfate, malate, maleate, malonate, methanesulfonate, 2-naphthalenesulfonate, nicotinate, nitrate, oleate, oxalate, palmitate, pamoate, pectinate, persulfate, 3-phenylpropionate, phosphate, picrate, pivalate, propionate, stearate, succinate, sulfate, tartrate, thiocyanate, toluenesulfonate, undecanoate, valerate salts, and the like. Representative alkali or alkaline earth metal salts include sodium, lithium, potassium, calcium, magnesium, and the like, as well as nontoxic ammonium, quaternary ammonium, and amine cations, including, but not limited to ammonium, tetramethylammonium, tetraethylammonium, methylamine, dimethylamine, trimethylamine, triethylamine, ethylamine, and the like. The pharmaceutically acceptable salts of the present disclosure include the conventional non-toxic salts of the parent compound formed, for example, from non-toxic inorganic or organic acids. The pharmaceutically acceptable salts of the present disclosure can be synthesized from the parent compound that contains a basic or acidic moiety by conventional chemical methods. Generally, such salts can be prepared by reacting the free acid or base forms of these compounds with a stoichiometric amount of the appropriate base or acid in water or in an organic solvent, or in a mixture of the two; generally, nonaqueous media like ether, ethyl acetate, ethanol, isopropanol, or acetonitrile are used. Lists of suitable salts are found in Remington's Pharmaceutical Sciences, 17^{th} ed., Mack Publishing Company, Easton, Pa., 1985, p. 1418, Pharmaceutical Salts: Properties, Selection, and Use, P. H. Stahl and C. G. Wermuth (eds.), Wiley-VCH, 2008, and Berge et al., Journal of Pharmaceutical Science, 66, 1-19 (1977), each of which is incorporated herein by reference in its entirety.

[0415] Pharmaceutically acceptable solvate: The term “pharmaceutically acceptable solvate,” as used herein, means a compound of the invention wherein molecules of a suitable solvent are incorporated in the crystal lattice. A suitable solvent is physiologically tolerable at the dosage administered. For example, solvates can be prepared by crystallization, recrystallization, or precipitation from a solution that includes organic solvents, water, or a mixture thereof. Examples of suitable solvents are ethanol, water (for example, mono-, di-, and tri-hydrates), N-methylpyrrolidinone (NMP), dimethyl sulfoxide (DMSO), N,N′-dimethylformamide (DMF), N,N′-dimethylacetamide (DMAC), 1,3-dimethyl-2-imidazolidinone (DMEU), 1,3-dimethyl-3,4,5,6-tetrahydro-2-(1H)-pyrimidinone (DMPU), acetonitrile (ACN), propylene glycol, ethyl acetate, benzyl alcohol, 2-pyrrolidone, benzyl benzoate, and the like. When water is the solvent, the solvate is referred to as a “hydrate.”

[0416] Pharmacokinetic: As used herein, “pharmacokinetic” refers to any one or more properties of a molecule or compound as it relates to the determination of the fate of substances administered to a living organism. Pharmacokinetics is divided into several areas including the extent and rate of absorption, distribution, metabolism and excretion. This is commonly referred to as ADME where: (A) Absorption is the process of a substance entering the blood circulation; (D) Distribution is the dispersion or dissemination of substances throughout the fluids and tissues of the body; (M) Metabolism (or Biotransformation) is the irreversible transformation of parent compounds into daughter metabolites; and (E) Excretion (or Elimination) refers to the elimination of the substances from the body. In rare cases, some drugs irreversibly accumulate in body tissue.

[0417] Polynucleotide: The term “polynucleotide” as used herein refers to polymers of nucleotides of any length, including ribonucleotides, deoxyribonucleotides, analogs thereof, or mixtures thereof. This term refers to the primary structure of the molecule. Thus, the term includes triple-, double- and single-stranded deoxyribonucleic acid (“DNA”), as well as triple-, double- and single-stranded ribonucleic acid (“RNA”). It also includes modified, for example by alkylation, and/or by capping, and unmodified forms of the polynucleotide. More particularly, the term “polynucleotide” includes polydeoxyribonucleotides (containing 2-deoxy-D-ribose), polyribonucleotides (containing D-ribose), including tRNA, rRNA, hRNA, siRNA and mRNA, whether spliced or unspliced, any other type of polynucleotide which is an N- or C-glycoside of a purine or pyrimidine base, and other polymers containing normucleotidic backbones, for example, polyamide (e.g., peptide nucleic acids “PNAs”) and polymorpholino polymers, and other synthetic sequence-specific nucleic acid polymers providing that the polymers contain nucleobases in a configuration which allows for base pairing and base stacking, such as is found in DNA and RNA. In particular aspects, the polynucleotide comprises an mRNA. In other aspect, the mRNA is a synthetic mRNA. In some aspects, the synthetic mRNA comprises at least one unnatural nucleobase. In some aspects, all nucleobases of a certain class have been replaced with unnatural nucleobases (e.g., all uridines in a polynucleotide disclosed herein can be replaced with an unnatural nucleobase, e.g., 5-methoxyuridine). In some aspects, the polynucleotide (e.g., a synthetic RNA or a synthetic DNA) comprises only natural nucleobases, i.e., A, C, T and U in the case of a synthetic DNA, or A, C, T, and U in the case of a synthetic RNA.

[0418] The skilled artisan will appreciate that the T bases in the codon maps disclosed herein are present in DNA, whereas the T bases would be replaced by U bases in corresponding RNAs. For example, a codon-nucleotide sequence disclosed herein in DNA form, e.g., a vector or an in-vitro translation (IVT) template, would have its T bases transcribed as U based in its corresponding transcribed mRNA. In this respect, both codon-optimized DNA sequences (comprising T) and their corresponding RNA sequences (comprising U) are considered codon-optimized nucleotide sequence of the present invention. A skilled artisan would also understand that equivalent codon-maps can be generated by replaced one or more bases with non-natural bases. Thus, e.g., a TTC codon (DNA map) would correspond to a UUC codon (RNA map), which in turn would correspond to a ΨΨC codon (RNA map in which U has been replaced with pseudouridine).

[0419] Standard A-T and G-C base pairs form under conditions which allow the formation of hydrogen bonds between the N3-H and C4-oxy of thymidine and the Ni and C6-NH₂, respectively, of adenosine and between the C2-oxy, N3 and C4-NH₂, of cytidine and the C2-NH₂, N′-H and C6-oxy, respectively, of guanosine. Thus, for example, guanosine (2-amino-6-oxy-9-β-D-ribofuranosyl-purine) can be modified to form isoguanosine (2-oxy-6-amino-9-β-D-ribofuranosyl-purine). Such modification results in a nucleoside base which will no longer effectively form a standard base pair with cytosine. However, modification of cytosine (1-β-D-ribofuranosyl-2-oxy-4-amino-pyrimidine) to form isocytosine (1-β-D-ribofuranosyl-2-amino-4-oxy-pyrimidine-) results in a modified nucleotide which will not effectively base pair with guanosine but will form a base pair with isoguanosine (U.S. Pat. No. 5,681,702 to Collins et al.). Isocytosine is available from Sigma Chemical Co. (St. Louis, Mo.); isocytidine can be prepared by the method described by Switzer et al. (1993) Biochemistry 32:10489-10496 and references cited therein; 2′-deoxy-5-methyl-isocytidine can be prepared by the method of Tor et al. (1993) J. Am. Chem. Soc. 115:4461-4467, and references cited therein; and isoguanine nucleotides can be prepared using the method described by Switzer et al., 1993, supra, and Mantsch et al. (1993) Biochem. 14:5593-5601, or by the method described in U.S. Pat. No. 5,780,610 to Collins et al. Other nonnatural base pairs can be synthesized by the method described in Piccirilli et al. (1990) Nature 343:33-37, for the synthesis of 2,6-diaminopyrimidine and its complement (1-methylpyrazolo-[4,3]pyrimidine-5,7-(4H,6H)-dione. Other such modified nucleotide units which form unique base pairs are known, such as those described in Leach et al. (1992) J. Am. Chem. Soc. 114:3675-3683 and Switzer et al., supra.

[0420] Polypeptide: The terms “polypeptide,” “peptide,” and “protein” are used interchangeably herein to refer to polymers of amino acids of any length. The polymer can comprise modified amino acids. The terms also encompass an amino acid polymer that has been modified naturally or by intervention; for example, disulfide bond formation, glycosylation, lipidation, acetylation, phosphorylation, or any other manipulation or modification, such as conjugation with a labeling component. Also included within the definition are, for example, polypeptides containing one or more analogs of an amino acid (including, for example, unnatural amino acids such as homocysteine, omithine, p-acetylphenylalanine, D-amino acids, and creatine), as well as other modifications known in the art.

[0421] The term, as used herein, refers to proteins, polypeptides, and peptides of any size, structure, or function. Polypeptides include gene products, naturally occurring polypeptides, synthetic polypeptides, homologs, orthologs, paralogs, fragments and other equivalents, variants, and analogs of the foregoing. A polypeptide can be a single polypeptide or can be a multi-molecular complex such as a dimer, trimer or tetramer. They can also comprise single chain or multichain polypeptides. Most commonly disulfide linkages are found in multichain polypeptides. The term polypeptide can also apply to amino acid polymers in which one or more amino acid residues are an artificial chemical analogue of a corresponding naturally occurring amino acid. In some embodiments, a “peptide” can be less than or equal to 50 amino acids long, e.g., about 5, 10, 15, 20, 25, 30, 35, 40, 45, or 50 amino acids long.

[0422] Preventing: As used herein, the term “preventing” refers to partially or completely delaying onset of an disease, disorder and/or condition; partially or completely delaying onset of one or more symptoms, features, or clinical manifestations of a particular disease, disorder, and/or condition; partially or completely delaying onset of one or more symptoms, features, or manifestations of a particular disease, disorder, and/or condition; partially or completely delaying progression from a particular disease, disorder and/or condition; and/or decreasing the risk of developing pathology associated with the disease, disorder, and/or condition.

[0423] Prophylactic: As used herein, “prophylactic” refers to a therapeutic or course of action used to prevent the onset of a disease or condition, or to prevent or delay a symptom associated with a bleeding episode, e.g., hemophilia.

[0424] Prophylaxis: As used herein, a “prophylaxis” refers to a measure taken to maintain health and prevent or delay the onset of a bleeding episode, or to prevent or delay symptoms associated with a disease or condition.

[0425] Recombinant: A “recombinant” polypeptide or protein refers to a polypeptide or protein produced via recombinant DNA technology. Recombinantly produced polypeptides and proteins expressed in engineered host cells are considered isolated for the purpose of the invention, as are native or recombinant polypeptides which have been separated, fractionated, or partially or substantially purified by any suitable technique. The polypeptides disclosed herein can be recombinantly produced using methods known in the art. Alternatively, the proteins and peptides disclosed herein can be chemically synthesized.

[0426] Similarity: As used herein, the term “similarity” refers to the overall relatedness between polymeric molecules, e.g. between polynucleotide molecules (e.g. DNA molecules and/or RNA molecules) and/or between polypeptide molecules. Calculation of percent similarity of polymeric molecules to one another can be performed in the same manner as a calculation of percent identity, except that calculation of percent similarity takes into account conservative substitutions as is understood in the art.

[0427] Subject: By “subject” or “individual” or “animal” or “patient” or “mammal,” is meant any subject, particularly a mammalian subject, for whom diagnosis, prognosis, or therapy is desired. Mammalian subjects include, but are not limited to, humans, domestic animals, farm animals, zoo animals, sport animals, pet animals such as dogs, cats, guinea pigs, rabbits, rats, mice, horses, cattle, cows; primates such as apes, monkeys, orangutans, and chimpanzees; canids such as dogs and wolves; felids such as cats, lions, and tigers; equids such as horses, donkeys, and zebras; bears, food animals such as cows, pigs, and sheep; ungulates such as deer and giraffes; rodents such as mice, rats, hamsters and guinea pigs; and so on. In certain embodiments, the mammal is a human subject. In other embodiments, a subject is a human patient. In a particular embodiment, a subject is a human patient or cells thereof whether in vivo, in vitro or ex vivo, amenable to the methods described herein.

[0428] Substantially: As used herein, the term “substantially” refers to the qualitative condition of exhibiting total or near-total extent or degree of a characteristic or property of interest. One of ordinary skill in the biological arts will understand that biological and chemical phenomena rarely, if ever, go to completion and/or proceed to completeness or achieve or avoid an absolute result. The term “substantially” is therefore used herein to capture the potential lack of completeness inherent in many biological and chemical phenomena.

[0429] Substantially equal: As used herein as it relates to time differences between doses, the term means plus/minus 2%.

[0430] Substantially simultaneous: As used herein and as it relates to plurality of doses, the term means within 2 seconds.

[0431] Suffering from: An individual who is “suffering from” a disease, disorder, and/or condition has been diagnosed with or displays one or more symptoms of the disease, disorder, and/or condition.

[0432] Susceptible to: An individual who is “susceptible to” a disease, disorder, and/or condition has not been diagnosed with and/or may not exhibit symptoms of the disease, disorder, and/or condition but harbors a propensity to develop a disease or its symptoms. In some embodiments, an individual who is susceptible to a disease, disorder, and/or condition (for example, cancer) can be characterized by one or more of the following: (1) a genetic mutation associated with development of the disease, disorder, and/or condition; (2) a genetic polymorphism associated with development of the disease, disorder, and/or condition; (3) increased and/or decreased expression and/or activity of a protein and/or nucleic acid associated with the disease, disorder, and/or condition; (4) habits and/or lifestyles associated with development of the disease, disorder, and/or condition; (5) a family history of the disease, disorder, and/or condition; and (6) exposure to and/or infection with a microbe associated with development of the disease, disorder, and/or condition. In some embodiments, an individual who is susceptible to a disease, disorder, and/or condition will develop the disease, disorder, and/or condition. In some embodiments, an individual who is susceptible to a disease, disorder, and/or condition will not develop the disease, disorder, and/or condition.

[0433] Therapeutic Agent: The terms “therapeutic agent” or “agent” refers to a molecular entity that, when administered to a subject, has a therapeutic, diagnostic, and/or prophylactic effect and/or elicits a desired biological and/or pharmacological effect. For example, in some embodiments, a bispecific antibody disclosed herein can be a therapeutic agent. In some embodiments, an agent is another molecule (e.g., a clotting factor, cofactor, etc.) which is co-administered as part of a combination therapy with at least one of the antibodies disclosed herein.

[0434] Therapeutically effective amount: As used herein, the term “therapeutically effective amount” means an amount of an agent to be delivered (e.g., nucleic acid, drug, therapeutic agent, diagnostic agent, prophylactic agent, etc.) that is sufficient, when administered to a subject suffering from or susceptible to an infection, disease, disorder, and/or condition, to treat, improve symptoms of, diagnose, prevent, and/or delay the onset of the infection, disease, disorder, and/or condition.

[0435] Therapeutically effective outcome: As used herein, the term “therapeutically effective outcome” means an outcome that is sufficient in a subject suffering from or susceptible to an infection, disease, disorder, and/or condition, to treat, improve symptoms of, diagnose, prevent, and/or delay the onset of the infection, disease, disorder, and/or condition.

[0436] Treat. treatment, therapy: As used herein, the terms “treat” or “treatment” or “therapy” or grammatical variants thereof refer to partially or completely alleviating, ameliorating, improving, relieving, delaying onset of, inhibiting progression of, reducing severity of, and/or reducing incidence of one or more symptoms or features of a bleeding disease, disorder, or condition, e.g., hemophilia. For example, “treating” a bleeding disorder can refer to prevent bleeding, decrease the frequency and/or severity of bleeding episodes, etc. Treatment can be administered to a subject who does not exhibit signs of a disease, disorder, and/or condition and/or to a subject who exhibits only early signs of a disease, disorder, and/or condition for the purpose of decreasing the risk of developing pathology associated with the disease, disorder, and/or condition.

[0437] Vector: A “vector” is a nucleic acid molecule, in particular self-replicating, which transfers an inserted nucleic acid molecule into and/or between host cells. The term includes vectors that function primarily for insertion of DNA or RNA into a cell (e.g., chromosomal integration), replication of vectors that function primarily for the replication of DNA or RNA, and expression vectors that function for transcription and/or translation of the DNA or RNA. In some aspects, the administration and/or expression of a nucleic acid (DNA or RNA, such as an mRNA) encoding a binding molecule disclosed herein can take place in vitro (e.g., during recombinant protein production), whereas in other cases it can take place in vivo (e.g., administration of an mRNA to a subject), or ex vivo (e.g., DNA or RNA introduced into an autologous or heterologous cells for administration to a subject in need thereof). Also included are vectors that provide more than one of the functions as described.

### II. Anti-FIX and Anti-FX Binding Molecules

[0438] The present disclosure provides antibodies that bind to factor IX and to factor X, as well as antigen binding portions thereof. These antibodies are capable of preferential binding to specific functional forms of these clotting factors. For example, in some embodiments, the disclosed antibodies against FIX preferentially bind to activated FIX (FIXa), e.g., free FIXa or FIXa covalently linked to a substrate mimic in the active site (FXa+EGR-CMK). In other embodiments, the disclosed antibodies preferentially bind to FIXa-SM over free FIXa or FIX zymogen. In yet other embodiments, the disclosed antibodies preferentially bind to free FIXa over FIXa-SM or FIX zymogen. In contrast, in some embodiments, the disclosed antibodies against FX preferentially bind to FX zymogen (FXz) over activated FX (FXa). This preferential binding is critical to generate bispecific molecules comprising an anti-FIXa moiety and an anti-FXz moiety that can specifically and simultaneously bind to FIXa and FXz. Factor VIII is a cofactor for FIXa which, in the presence of Ca²⁺ and phospholipids forms a complex with FX that converts FX to the activated FXa. Therefore, the formation of an antibody-mediated complex between FIXa and FXz mimics the effect of FVIIIa.

[0439] In still other embodiments, some disclosed antibodies preferentially bind to FIX zymogen over free FIXa or FIXa-SM (“anti-FIXz antibody”). Therefore, the anti-FIXz antibody can be used to generate a bispecific molecule comprising the anti-FIXz antibody and an anti-FX antibody (e.g., an anti-FXz antibody or an anti-FXa antibody).

[0440] In certain embodiments, some disclosed anti-FX antibodies preferentially bind to FXa over FXz (“anti-FXa antibody”). The anti-FXa antibody can be used to generate a bispecific molecule comprising the anti-FXa antibody and an anti-FIX antibody (e.g., an anti-FIXa antibody or an anti-FIXz antibody).

[0441] The formation of antibody-mediated complex between FIX and FX can therefore be used to bypass FVIII replacement therapy, in particular, in subjects having developed antibodies against FVIII or at risk of developing antibodies against FVIII.

[0442] The present disclosure also provides a bispecific binding molecule that binds to FX (FXz and/or FXa) and FIX (FIXz and/or FIXa). In one embodiment, the bispecific binding molecule can be a combination of any one of anti-FIXa antibody or anti-FIXz antibody and any one of anti-FXa antibody or anti-FXz antibody. In some embodiments, the bispecific binding molecule specifically binds to FXz, FIXz, and FIXa, but has no detectable binding to FXa. In certain embodiments, the bispecific binding molecule binds to FIXz, FIXa, and FXz with different binding affinity (e.g., K_{D}). In other embodiments, the bispecific binding molecule binds with a K_{D} less than 1 μM to each of FIXz, FIXa, and FXz (e.g., 8 nM, 2 nM, or 20 nM, respectively).

### (a) Anti-FIXa Binding Molecules

[0443] The present disclosure provides anti-FIX binding molecules, e.g., anti-FIX antibodies or molecules comprising antigen binding portions thereof, that preferentially bind activated FIX (FIXa) over FIX zymogen.

[0444] Factor IX (FIX) is synthesized by liver hepatocytes as a pre-prozymogen that requires extensive posttranslational modification. The pre-prozymogen contains a pre-peptide (hydrophobic signal peptide) at its amino terminal that transports the growing polypeptide into the lumen of the Endoplasmic Reticulum. Once inside the ER, this signal peptide is cleaved by a signal peptidase. A pro-peptide functions as a recognition element for a vitamin K-dependent carboxylase (γ-glutamyl carboxylase) which modifies 12 glutamic acid residues to gamma-carboxyglutamyl (Gla) residues. These residues are required for the association with the anionic phospholipid surface through Ca2+-dependent binding.

[0445] The amino acid sequence of pre-pro-FIX zymogen is provided below (the signal sequence is underlined (1-28); the propeptide sequence (29-46) is bolded):

(SEQ ID NO: 764)
MQRVNMIMAESPGLITICLLGYLLSAECTVFLDHE
NANKILNRPKRYNSGKLEEFVQGNLERECMEEKCS
FEEAREVFENTERTTEFWKQYVDGDQCESNPCLNG
GSCKDDINSYECWCPFGFEGKNCELDVTCNIKNGR
CEQFCKNSADNKVVCSCTEGYRLAENQKSCEPAVP
FPCGRVSVSQTSKLTRAETVFPDVDYVNSTEAETI
LDNITQSTQSFNDFTRVVGGEDAKPGQFPWQVVLN
GKVDAFCGGSIVNEKWIVTAAHCVETGVKITVVAG
EHNIEETEHTEQKRNVIRIIPHHNYNAAINKYNHD
IALLELDEPLVLNSYVTPICIADKEYTNIFLKFGS
GYVSGWGRVFHKGRSALVLQYLRVPLVDRATCLRS
TKFTIYNNMFCAGFHEGGRDSCQGDSGGPHVTEVE
GTSFLTGIISWGEECAMKGKYGIYTKVSRYVNWIK
EKTKLT

[0446] After the cleavage of the signal peptide and the propeptide, FIX is in a zymogen form. FIX zymogen thus circulates as a 415 amino acid, single chain polypeptide. See, Vysotchin et al., J. Biol. Chem. 268:8436 (1993). In one embodiment, FIX zymogen is amino acids 47 to 461 of SEQ ID NO: 764. In another embodiment, FIX zymogen is amino acids 47 to 461 of SEQ ID NO: 764, wherein amino acid residue 180 is alanine instead of arginine (i.e., non-activatable FIX).

[0447] The zymogen of FIX is activated by FXIa or by the tissue factor/FVIIa complex. The first cleavage is at Arg191 (Arg145 in the mature FIX sequence), generating an inactive FIX-alpha. The second cleavage at Arg226 (Arg180 in the mature FIX sequence) removes 35 amino acids of the FIX activation peptide and results in a catalytically active molecule FIXa-beta. This catalytically active FIXa not associated with FVIIIa is also called herein as free FIXa. This resulting heterodimer is held by a disulfide bridge at Cys178-Cys335. The serine protease contains a catalytic triad of His267, Asp315, and Ser411. Upon cleavage at Arg226, Val227 can form a salt bridge with Asp410, which is a characteristic of active serine proteases. In one embodiment, free FIXa consists of amino acids 47 to 191 of SEQ ID NO: 764 and amino acids 227 to 461 of SEQ ID NO: 764, wherein amino acid 178 and amino acid 335 of SEQ ID NO: 764 form a disulfide bond.

[0448] It is known, however, that activity of free FIXa is similar to the activity of FIX zymogen. The complex formation with cofactor FVIIIa represents a critical second phase of activation, after which the intrinsic Xase complex reaches an approximately 200,000-fold enhanced activity that is strictly specific toward the physiological substrate FX and restricted to the surface of activated platelets (van Dieijen et al., J Biol Chem. 1981 Apr. 10; 256(7):3433-42). This macromolecular activation is assisted by low-molecular-weight agonists, including Ca2+(Mathur et al., Biol. Chem., 272 (1997), pp. 23418-23426). Several lines of evidence indicate that Ca2+ binding is accompanied by a conformational rearrangement (Bajaj et al., Proc. Natl. Acad. Sci. USA, 89 (1992), pp. 152-156, Enfield and Thompson, Blood, 64 (1984), pp. 821-831). This superactive FIXa in a tenase complex can be mimicked by covalently attaching a substrate mimic (e.g., Glu-Gly-Arg-chloromethyl ketone (EGR-CMK)) to the active site of FIXa (FXa+EGR-CMK, also called as FIXa-SM). Therefore, FIXa-SM can be used as an important tool to distinguish antibodies or antigen binding portion thereof that preferentially bind to superactive FIXa (in tenase complex) compared to free FIXa.

[0449] Tripeptide chloromethylketones are generally accepted in the field as substrate mimics, with the tripeptide sequence representing the native substrate sequence that is cleaved by a particular enzyme and the CMK part allows this tripeptide to be irreversibly locked into the active site since it reacts with the active site serine. As a consequence, if an enzyme is bound to a substrate-mimic, this should represent the substrate bound form, i.e. the true active conformation. See Brandsteter et al. (1995) Proc. Natl. Acad. Sci. USA 92(21):9796-80, and Hopfner et al. (1999) Structure 7(8):989-96.

[0450] The term “FIX zymogen” can be used interchangeably herein with “FIXz,” “FIX precursor,” “unactivated FIX,” “non-activated FIX,” or “non-activated FIX precursor.” In one embodiment, FIX zymogen (FIXz) includes non-activated FIX precursor in which the activation peptide (e.g., 35 activation peptide that are represented as amino acids 146 to 180 of SEQ ID NO: 764 (mature numbering) is not cleaved from the precursor. FIX zymogen can include any naturally-occurring or engineered variants. A non-limiting example of FIX zymogen is shown in SEQ ID NO: 764. In another embodiment, FIX zymogen is non-activatable FIX (FIXn), which is engineered to be non-active in the presence of Factor XIa, activated plasma thromboplastin antecedent. An example of non-activatable FIX can be FIX carrying an arginine to alanine mutation at position 180 (mature numbering) preventing its activation and maintaining Factor IX in the zymogen form (FIXz). FIX zymogen can optionally contain a signal peptide and/or propeptide.

[0451] The term “activated FIX” can be used interchangeably herein with “FIXa”. In one embodiment, activated FIX is wild-type, naturally occurring FIXa (also referred to herein as “wild-type FIXa”). In another embodiment, FIXa comprises non-naturally occurring FIXa, e.g., FIXa conformational variant. For example, FIXa can be a FIXa-SM, which is designed to have the same conformation as wild-type, naturally occurring FIXa bound to its substrate, FX. In a particular embodiment, FIXa-SM is activated FIX with a substrate mimic covalently bound to the active site, which is intended to mimic the most active conformation of activated FIX.

[0452] FIX zymogen and FIXa can include FIX variants. In one embodiment, FIX variants have been cloned, as described in U.S. Pat. Nos. 4,770,999 and 7,700,734, and cDNA coding for human Factor IX has been isolated, characterized, and cloned into expression vectors (see, for example, Choo et al., Nature 299:178-180 (1982); Fair et al., Blood 64:194-204 (1984); and Kurachi et al., Proc. Natl. Acad. Sci., U.S.A. 79:6461-6464 (1982)). One particular variant of FIX, the R338L FIX (Padua) variant, characterized by Simioni et al, 2009, comprises a gain-of-function mutation, which correlates with a nearly 8-fold increase in the activity of the Padua variant relative to native FIX. FIX variants can also include any FIX polypeptide having one or more conservative amino acid substitutions, which do not affect the FIX activity of the FIX polypeptide.

[0453] The present disclosure therefore provides an antibody (e.g., an isolated antibody), or an antigen binding portion thereof, that specifically binds to activated factor IX (FIXa) (e.g., free FIXa or FIXa-SM), wherein the anti-FIXa antibody or antigen binding portion thereof preferentially binds to FIXa in the presence of FIXa and FIX zymogen (“anti-FIXa antibody or antigen binding portion thereof”).

[0454] In some aspects, the anti-FIXa antibody, or antigen binding portion thereof, binds to FIXa with a binding affinity higher than a binding affinity of the anti-FIXa antibody or antigen binding portion thereof to FIXz. In one embodiment the binding affinity is expressed as K_{D}.

[0455] The present disclosure also provides an isolated anti-FIXa antibody, or antigen binding portion thereof, which binds to FIXa with a binding affinity higher than a binding affinity of the anti-FIXa antibody or antigen binding portion thereof to FIXz. In some aspects, the anti-FIXa antibody, or antigen binding portion thereof, binds to FIXa with a K_{D} of about 100 nM or less (e.g., 1 nM to 100 nM or 0.1 nM to 100 nM), about 95 nM or less, about 90 nM or less, about 85 nM or less, about 80 nM or less, about 75 nM or less, about 70 nM or less, about 65 nM or less, about 60 nM or less, about 55 nM or less, about 50 nM or less, about 45 nM or less, about 40 nM or less, about 35 nM or less, about 30 nM or less, about 25 nM or less, about 20 nM or less, about 15 nM or less, about 10 nM or less, about 5 nM or less, or about 1 nM or less as determined by a Bio-Layer Interferometry (BLI) assay. In other embodiments, the anti-FIXa antibody, or antigen binding portion thereof, binds to FIXa with a K_{D} of about 10 nM or less, about 9 nM or less, about 8 nM or less, about 7 nM or less, about 6 nM or less, about 5 nM or less, about 4 nM or less, about 3 nM or less, about 2 nM or less, about 1 nM or less, about 0.5 nM or less, about 0.2 nM or less, about 0.1 nM or less, or about 0.05 nM or less. In yet other embodiments, the anti-FIXa antibody, or antigen binding portion thereof, binds to FIXa with a K_{D} of 1 nM to 100 nM, 1 nM to 90 nM, 1 nM to 80 nM, 1 nM to 70 nM, 1 nM to 60 nM, 1 nM to 50 nM, 1 nM to 40 nM, 1 nM to 30 nM, 1 nM to 20 nM, 1 nM to 10 nM, 0.1 nM to 100 nM, 0.1 nM to 90 nM, 0.1 nM to 80 nM, 0.1 nM to 70 nM, 0.1 nM to 60 nM, 0.1 nM to 50 nM, 0.1 nM to 40 nM, 0.1 nM to 30 nM, 0.1 nM to 20 nM, 0.1 nM to 10 nM, or 0.1 nM to 1 nM.

[0456] In some aspects, the anti-FIXa antibody, or antigen binding portion thereof, cross-competes with a reference antibody selected from the group consisting of the antibodies in FIGS. 3A, 3B, and/or 3C. In some aspects, the anti-FIXa antibody, or antigen binding portion thereof, binds to the same epitope as a reference antibody selected from the group consisting of the antibodies in FIGS. 3A, 3B, and/or 3C. In some aspects, the reference antibody is selected from BIIB-9-484, BIIB-9-440, BIIB-9-882, BIIB-9-460, BIIB-9-433, and any combination thereof.

[0457] In further aspects, the anti-FIXa antibody or antigen binding portion thereof can further be classified into three classes:

Class I: anti-FIXa antibodies or antigen binding portion thereof that preferentially binds to FIXa-SM over free FIXa or FIXz (FIG. 3A antibodies);
Class II: anti-FIXa antibodies or antigen binding portion thereof that preferentially binds to free FIXa over FIXa-SM or FIXz (FIG. 3B antibodies); and
Class III: anti-FIXa antibodies or antigen binding portion thereof that binds to free FIXa and FIXa-SM with near equivalency, but do not appreciably associate with FIXz (FIG. 3C antibodies).

[0458] In some embodiments, the anti-FIXa antibody, or antigen binding portion thereof, cross-competes with a reference antibody selected from the group consisting of the antibodies in FIG. 3A. In other embodiments, the anti-FIXa antibody, or antigen binding portion thereof, binds to the same epitope as a reference antibody selected from the group consisting of the antibodies in FIG. 3A. In some embodiments, the anti-FIXa antibody, or antigen binding portion thereof, cross-competes with a reference antibody selected from the group consisting of the antibodies in FIG. 3B. In other embodiments, the anti-FIXa antibody, or antigen binding portion thereof, binds to the same epitope as a reference antibody selected from the group consisting of the antibodies in FIG. 3B. In some embodiments, the anti-FIXa antibody, or antigen binding portion thereof, cross-competes with a reference antibody selected from the group consisting of the antibodies in FIG. 3C. In other embodiments, the anti-FIXa antibody, or antigen binding portion thereof, binds to the same epitope as a reference antibody selected from the group consisting of the antibodies in FIG. 3C.

[0459] In some aspects, the anti-FIXa antibody, or antigen binding portion thereof, comprises a VH CDR1, a VH CDR2, and a VH CDR3, wherein the VH CDR3 comprises
[0460] (i) a VH CDR3 sequence identical to a VH CDR3 sequence selected from the group consisting of VH CDR3 sequences in FIG. 3A, or
[0461] (ii) a VH CDR3 sequence identical to a VH CDR3 sequence selected from the group consisting of VH CDR3 sequences in FIG. 3A except for 1, 2, or 3 amino acid substitutions.

[0462] In other aspects, the anti-FIXa antibody, or antigen binding portion thereof, comprises a VH CDR1, a VH CDR2, and a VH CDR3, wherein the VH CDR3 comprises
[0463] (i) a VH CDR3 sequence identical to a VH CDR3 sequence selected from the group consisting of VH CDR3 sequences in FIG. 3B, or
[0464] (ii) a VH CDR3 sequence identical to a VH CDR3 sequence selected from the group consisting of VH CDR3 sequences in FIG. 3B except for 1, 2, or 3 amino acid substitutions.

[0465] In some aspects, the anti-FIXa antibody, or antigen binding portion thereof, comprises a VH CDR1, a VH CDR2, and a VH CDR3, wherein the VH CDR3 comprises
[0466] (i) a VH CDR3 sequence identical to a VH CDR3 sequence selected from the group consisting of VH CDR3 sequences in FIG. 3C, or
[0467] (ii) a VH CDR3 sequence identical to a VH CDR3 sequence selected from the group consisting of VH CDR3 sequences in FIG. 3C except for 1, 2, or 3 amino acid substitutions.

[0468] In some aspects, the amino acid substitutions are conservative amino acid substitutions. In other aspects, the amino acid substitutions are back mutation.

[0469] In some aspects, the anti-FIXa antibody, or antigen binding portion thereof, comprises a VH CDR1, VH CDR2, and VH CDR3, wherein the VH CDR3 sequence comprises the amino acid sequence ARDX₁X₂X₃X₄X₅X₆YYX₇MDV (SEQ ID NO:753), wherein X₁ is V or G, X₂ is G or V, X₃ is G or R, X₄ is Y or V, X₅ is A or S, X₆ is G or D, X₇ is G or none.

[0470] A person of skill in the art would understand that when a position is described as “none” or “absent” in a consensus sequence, such absence does not indicate a breakage in the polypeptide chain. These terms merely reflects the occurrence of insertions and deletions in the amino acid chains as observed in a multiple sequence alignment. Thus, when two sequences, one of which contains an amino acid insertion, are aligned to generate a consensus sequence, the sequence lacking the insertion will have an “absent” (“none”) amino acid at that position.

[0471] In some aspects, the anti-FIXa antibody, or antigen binding portion thereof, comprises a VH CDR1, a VH CDR2, and a VH CDR3, wherein the VH CDR3 sequence comprises an amino acid sequence selected from ARDVGGYAGYYGMDV (SEQ ID NO: 905; VH CDR 3 for BIIB-9-484; BIIB-9-1335; and BIIB-9-1336), ARDISTDGESSLYYYMDV (SEQ ID NO: 901; BIIB-9-460), ARGPTDSSGYLDMDV (SEQ ID NO: 1186; BIIB-9-882), ARSPRHKVRGPNWFDP (SEQ ID NO: 899; BIIB-9-440), or ARDGPRVSDYYMDV (SEQ ID NO: 912; BIIB-9-619). In some aspects, the VH CDR3 sequences disclosed herein can comprise 1, 2, or 3 amino acid substitutions.

[0472] In some aspects, the anti-FIXa antibody, or antigen binding portion thereof, comprises a VH CDR1, a VH CDR2, and VH CDR3, wherein the VH CDR1 sequence comprises
[0473] (i) a VH CDR1 sequence identical to a sequence selected from the group consisting of the VH CDR1 sequences disclosed in FIG. 3A, or
[0474] (ii) a VH CDR1 sequence identical to a sequence selected from the group consisting of the VH CDR1 sequences disclosed in FIG. 3A except for 1, 2, or 3 amino acid substitutions.

[0475] In some aspects, the anti-FIXa antibody, or antigen binding portion thereof, comprises a VH CDR1, a VH CDR2, and VH CDR3, wherein the VH CDR1 sequence comprises
[0476] (i) a VH CDR1 sequence identical to a sequence selected from the group consisting of the VH CDR1 sequences disclosed in FIG. 3B, or
[0477] (ii) a VH CDR1 sequence identical to a sequence selected from the group consisting of the VH CDR1 sequences disclosed in FIG. 3B except for 1, 2, or 3 amino acid substitutions.

[0478] In some aspects, the anti-FIXa antibody, or antigen binding portion thereof, comprises a VH CDR1, a VH CDR2, and VH CDR3, wherein the VH CDR1 sequence comprises
[0479] (i) a VH CDR1 sequence identical to a sequence selected from the group consisting of the VH CDR1 sequences disclosed in FIG. 3C, or
[0480] (ii) a VH CDR1 sequence identical to a sequence selected from the group consisting of the VH CDR1 sequences disclosed in FIG. 3C except for 1, 2, or 3 amino acid substitutions.

[0481] In some aspects, the anti-FIXa antibody, or antigen binding portion thereof, comprises a VH CDR1, a VH CDR2, and VH CDR3, wherein the VH CDR2 sequence comprises
[0482] (i) a VH CDR2 sequence identical to a sequence selected from the group consisting of the VH CDR2 sequences disclosed in FIG. 3A, or
[0483] (ii) a VH CDR2 sequence identical to a sequence selected from the group consisting of the VH CDR2 sequences disclosed in FIG. 3A except for 1, 2, or 3 amino acid substitutions.

[0484] In some aspects, the anti-FIXa antibody, or antigen binding portion thereof, comprises a VH CDR1, a VH CDR2, and VH CDR3, wherein the VH CDR2 sequence comprises
[0485] (i) a VH CDR2 sequence identical to a sequence selected from the group consisting of the VH CDR2 sequences disclosed in FIG. 3B, or
[0486] (ii) a VH CDR2 sequence identical to a sequence selected from the group consisting of the VH CDR2 sequences disclosed in FIG. 3B except for 1, 2, or 3 amino acid substitutions.

[0487] In some aspects, the anti-FIXa antibody, or antigen binding portion thereof, comprises a VH CDR1, a VH CDR2, and VH CDR3, wherein the VH CDR2 sequence comprises
[0488] (i) a VH CDR2 sequence identical to a sequence selected from the group consisting of the VH CDR2 sequences disclosed in FIG. 3C, or
[0489] (ii) a VH CDR2 sequence identical to a sequence selected from the group consisting of the VH CDR2 sequences disclosed in FIG. 3C except for 1, 2, or 3 amino acid substitutions.

[0490] In some aspects, the anti-FIXa antibody, or antigen binding portion thereof, comprises a VL CDR1, a VL CDR2, and a VL CDR3, wherein the VL CDR1 sequence comprises
[0491] (i) a VL CDR1 sequence identical to a sequence selected from the group consisting of the VL CDR1 sequences disclosed in FIG. 3A, or
[0492] (ii) a VL CDR1 sequence identical to a sequence selected from the group consisting of the VL CDR1 sequences disclosed in FIG. 3A except for 1, 2, or 3 amino acid substitutions.

[0493] In some aspects, the anti-FIXa antibody, or antigen binding portion thereof, comprises a VL CDR1, a VL CDR2, and a VL CDR3, wherein the VL CDR1 sequence comprises
[0494] (i) a VL CDR1 sequence identical to a sequence selected from the group consisting of the VL CDR1 sequences disclosed in FIG. 3B, or
[0495] (ii) a VL CDR1 sequence identical to a sequence selected from the group consisting of the VL CDR1 sequences disclosed in FIG. 3B except for 1, 2, or 3 amino acid substitutions.

[0496] In some aspects, the anti-FIXa antibody, or antigen binding portion thereof, comprises a VL CDR1, a VL CDR2, and a VL CDR3, wherein the VL CDR1 sequence comprises
[0497] (i) a VL CDR1 sequence identical to a sequence selected from the group consisting of the VL CDR1 sequences disclosed in FIG. 3C, or
[0498] (ii) a VL CDR1 sequence identical to a sequence selected from the group consisting of the VL CDR1 sequences disclosed in FIG. 3C except for 1, 2, or 3 amino acid substitutions.

[0499] In some aspects, the anti-FIXa antibody, or antigen binding portion thereof, comprises a VL CDR1, a VL CDR2, and a VL CDR3, wherein the VL CDR2 sequence comprises
[0500] (i) a VL CDR2 sequence identical to a sequence selected from the group consisting of the VL CDR2 sequences in FIG. 3A, or
[0501] (ii) a VL CDR2 sequence identical to a sequence selected from the group consisting of the VL CDR2 sequences in FIG. 3A except for 1, 2, or 3 amino acid substitutions.

[0502] In some aspects, the anti-FIXa antibody, or antigen binding portion thereof, comprises a VL CDR1, a VL CDR2, and a VL CDR3, wherein the VL CDR2 sequence comprises
[0503] (i) a VL CDR2 sequence identical to a sequence selected from the group consisting of the VL CDR2 sequences in FIG. 3B, or
[0504] (ii) a VL CDR2 sequence identical to a sequence selected from the group consisting of the VL CDR2 sequences in FIG. 3B except for 1, 2, or 3 amino acid substitutions.

[0505] In some aspects, the anti-FIXa antibody, or antigen binding portion thereof, comprises a VL CDR1, a VL CDR2, and a VL CDR3, wherein the VL CDR2 sequence comprises
[0506] (i) a VL CDR2 sequence identical to a sequence selected from the group consisting of the VL CDR2s sequences in FIG. 3C, or
[0507] (ii) a VL CDR2 sequence identical to a sequence selected from the group consisting of the VL CDR2s sequences in FIG. 3C except for 1, 2, or 3 amino acid substitutions.

[0508] In some aspects, the anti-FIXa antibody, or antigen binding portion thereof, comprises a VL CDR1, a VL CDR2, and a VL CDR3, wherein the VL CDR3 sequence comprises
[0509] (i) a VL CDR3 sequence identical to a sequence selected from the group consisting of the VL CDR3 sequences disclosed in FIG. 3A, or
[0510] (ii) a VL CDR3 sequence identical to a sequence selected from the group consisting of the VL CDR3 sequences disclosed in FIG. 3A except for 1, 2, or 3 amino acid substitutions.

[0511] In some aspects, the anti-FIXa antibody, or antigen binding portion thereof, comprises a VL CDR1, a VL CDR2, and a VL CDR3, wherein the VL CDR3 sequence comprises
[0512] (i) a VL CDR3 sequence identical to a sequence selected from the group consisting of the VL CDR3 sequences disclosed in FIG. 3B, or
[0513] (ii) a VL CDR3 sequence identical to a sequence selected from the group consisting of the VL CDR3 sequences disclosed in FIG. 3B except for 1, 2, or 3 amino acid substitutions.

[0514] In some aspects, the anti-FIXa antibody, or antigen binding portion thereof, comprises a VL CDR1, a VL CDR2, and a VL CDR3, wherein the VL CDR3 sequence comprises
[0515] (i) a VL CDR3 sequence identical to a sequence selected from the group consisting of the VL CDR3 sequences disclosed in FIG. 3C, or
[0516] (ii) a VL CDR3 sequence identical to a sequence selected from the group consisting of the VL CDR3 sequences disclosed in FIG. 3C except for 1, 2, or 3 amino acid substitutions.

[0517] The present disclosure also provides an isolated antibody, or antigen binding portion thereof, which specifically binds to FIXa, comprising a VH CDR1, a VH CDR2, and a VH CDR3, and a VL CDR1, a VL CDR2, and a VL CDR3, wherein the VH CDR1, VH CDR2, and VH CDR3 and the VL CDR1, VL CDR2, and VL CDR3 comprise the VH CDR1, VH CDR2, and VH CDR3 and the VL CDR1, VL CDR2, and VL CDR3 of an anti-FIXa antibody selected from the group consisting of the antibodies in FIG. 3A: BIIB-9-605, BIIB-9-475, BIIB-9-477, BIIB-9-479, BIIB-9-480, BIIB-9-558, BIIB-9-414, BIIB-9-415, BIIB-9-425, BIIB-9-440, BIIB-9-452, BIIB-9-460, BIIB-9-461, BIIB-9-465, BIIB-9-564, BIIB-9-484, BIIB-9-469, BIIB-9-566, BIIB-9-567, BIIB-9-569, BIIB-9-588, BIIB-9-611, BIIB-9-619, BIIB-9-626, BIIB-9-883, BIIB-9-419, BIIB-9-451, BIIB-9-473, BIIB-9-565, BIIB-9-573, BIIB-9-579, BIIB-9-581, BIIB-9-582, BIIB-9-585, BIIB-9-587, BIIB-9-590, BIIB-9-592, BIIB-9-606, BIIB-9-608 BIIB-9-616, BIIB-9-621, BIIB-9-622, BIIB-9-627, BIIB-9-1335, and BIIB-9-1336.

[0518] In some embodiments, the disclosure includes an isolated antibody, or antigen binding portion thereof, which specifically binds to FIXa, comprising a VH CDR1, a VH CDR2, and a VH CDR3, and a VL CDR1, a VL CDR2, and a VL CDR3, wherein the VH CDR1, VH CDR2, and VH CDR3 and the VL CDR1, VL CDR2, and VL CDR3 comprise the VH CDR1, VH CDR2, and VH CDR3 and the VL CDR1, VL CDR2, and VL CDR3 of an anti-FIXa antibody selected from the group consisting of the antibodies in FIG. 3B: BIIB-9-408, BIIB-9-416, BIIB-9-629, or BIIB-9-885.

[0519] In other embodiments, the disclosure provides an isolated antibody, or antigen binding portion thereof, which specifically binds to FIXa, comprising a VH CDR1, a VH CDR2, and a VH CDR3, and a VL CDR1, a VL CDR2, and a VL CDR3, wherein the VH CDR1, VH CDR2, and VH CDR3 and the VL CDR1, VL CDR2, and VL CDR3 comprise the VH CDR1, VH CDR2, and VH CDR3 and the VL CDR1, VL CDR2, and VL CDR3 of an anti-FIXa antibody selected from the group consisting of the antibodies in FIG. 3C: BIIB-9-607, BIIB-9-471, BIIB-9-472, BIIB-9-439, BIIB-9-446, BIIB-9-568, BIIB-9-615, BIIB-9-628, BIIB-9-882, BIIB-9-884, BIIB-9-886, BIIB-9-887, BIIB-9-888, BIIB-9-889, BIIB-9-433, BIIB-9-445, BIIB-9-470, BIIB-9-625, BIIB-9-1264, BIIB-9-1265, BIIB-9-1266, BIIB-9-1267, BIIB-9-1268, BIIB-9-1269, BIIB-9-1270, BIIB-9-1271, BIIB-9-1272, BIIB-9-1273, BIIB-9-1274, BIIB-9-1275, BIIB-9-1276, BIIB-9-1277, BIIB-9-1278, BIIB-9-1279, BIIB-9-1280, BIIB-9-1281, BIIB-9-1282, BIIB-9-1283, BIIB-9-1284, BIIB-9-1285, BIIB-9-1286, and BIIB-9-1287.

[0520] In some aspects, the anti-FIXa antibody, or antigen binding portion thereof, comprises VH CDR1, VH CDR2, and VH CDR3 sequences comprising SEQ ID NOs: 800-844, SEQ ID NOs: 845-889, and SEQ ID NOs: 890-934, respectively (VH CDRs for Class I antibodies), and/or VL CDR1, VL CDR2, and VL CDR3 sequences comprising SEQ ID NOs: 935-979, SEQ ID NOs: 980-1024, and SEQ ID NO: 1025-1069, respectively (VL CDRs for Class I antibodies).

[0521] In some aspects, the anti-FIXa antibody, or antigen binding portion thereof, comprises VH CDR1, VH CDR2, and VH CDR3 sequences comprising SEQ ID NOs: 1070-1073, SEQ ID NOs: 1074-1077, and SEQ ID NOs: 1078-1081, respectively (VH CDRs for Class II antibodies), and/or VL CDR1, VL CDR2, and VL CDR3 sequences comprising SEQ ID NOs: 1082-1085, SEQ ID NOs: 1086-1089, and SEQ ID NO: 1090-1093, respectively (VL CDRs for Class II antibodies).

[0522] In some aspects, the anti-FIXa antibody, or antigen binding portion thereof, comprises VH CDR1, VH CDR2, and VH CDR3 sequences comprising SEQ ID NOs: 1094-1135, SEQ ID NOs: 1136-1177, and SEQ ID NOs: 1178-1219, respectively (VH CDRs for Class III antibodies), and/or VL CDR1, VL CDR2, and VL CDR3 sequences comprising SEQ ID NOs: 1220-1261, SEQ ID NOs: 1262-1303, and SEQ ID NO: 1304-1345, respectively (VL CDRs for Class III antibodies).

[0523] In some aspects, the anti-FIXa antibody, or antigen binding portion thereof, comprises VH CDR1, VH CDR2, and VH CDR3 sequences comprising SEQ ID NO: 815, SEQ ID NO: 860, and SEQ ID NO: 905, respectively (VH CDRs for BIIB-9-484 antibody), and/or VL CDR1, VL CDR2, and VL CDR3 sequences comprising SEQ ID NO: 950, SEQ ID NO: 995, and SEQ ID NO: 1040, respectively (VL CDRs for BIIB-9-484 antibody).

[0524] In some aspects, the anti-FIXa antibody, or antigen binding portion thereof, comprises VH CDR1, VH CDR2, and VH CDR3 sequences comprising SEQ ID NO: 843, SEQ ID NO: 888, and SEQ ID NO: 933, respectively (VH CDRs for BIIB-9-1335 antibody), and/or VL CDR1, VL CDR2, and VL CDR3 sequences comprising SEQ ID NO: 950, SEQ ID NO: 995, and SEQ ID NO: 1040, respectively (VL CDRs for BIIB-9-1335 antibody).

[0525] In some aspects, the anti-FIXa antibody, or antigen binding portion thereof, comprises VH CDR1, VH CDR2, and VH CDR3 sequences comprising SEQ ID NO: 844, SEQ ID NO: 889, and SEQ ID NO: 934, respectively (VH CDRs for BIIB-9-1336 antibody), and/or VL CDR1, VL CDR2, and VL CDR3 sequences comprising SEQ ID NO: 950, SEQ ID NO: 995, and SEQ ID NO: 1040, respectively (VL CDRs for BIIB-9-1336 antibody).

[0526] In other aspects, the anti-FIXa antibody, or antigen binding portion thereof, cross-competes with antibodies BIIB-9-484, BIIB-9-1335, and BIIB-9-1336 and/or binds to the same epitope as antibodies BIIB-9-484, BIIB-9-1335, and BIIB-9-1336. In certain aspects, the anti-FIXa antibody, or antigen binding portion thereof, comprises VH CDR1, VH CDR2, and VH CDR3 and VL CDR1, VL CDR2, and VL CDR3, wherein the VH CDR3 comprises ARDVGGYAGYYGMDV (SEQ ID NO: 905, BIIB-9-484 VH CDR3), VH CDR2 comprises SISSX₁X₂SYIYYAX₃SVKG (SEQ ID NO: 754), wherein X₁ is S, G, or any conservative substitution, X₂ is S, E, or any conservative substitution, and X₃ is D, E, or any conservative substitution, VH CDR1 comprises FTFX₄SYX₅MX₆ (SEQ ID NO: 755), wherein X₄ is S, G, or any conservative substitution, X₅ is D, S, or any conservative substitution, and X₆ is H, N, or any conservative substitution. The anti-FIXa antibody, or antigen binding portion thereof, can comprises SEQ ID NO: 815 for VH CDR1, SEQ ID NO: 860 for VH CDR2, and SEQ ID NO: 905 for VH CDR3. (BIIB-9-484 VH CDRs)

[0527] In some aspects, the anti-FIXa antibody, or antigen binding portion thereof, comprises

[0528] (a1) VH CDR1, VH CDR2, and VH CDR3 sequences comprising SEQ ID NO: 809, SEQ ID NO: 854, and SEQ ID NO: 899, respectively (VH CDRs for BIIB-9-440 antibody), and/or VL CDR1, VL CDR2, and VL CDR3 sequences comprising SEQ ID NO: 944, SEQ ID NO: 989, and SEQ ID NO: 1034, respectively (VL CDRs for BIIB-9-440 antibody);

[0529] (a2) VH CDR1, VH CDR2, and VH CDR3 sequences comprising SEQ ID NO: 1102, SEQ ID NO: 1144, and SEQ ID NO: 1186, respectively (VH CDRs for BIIB-9-882 antibody), and/or VL CDR1, VL CDR2, and VL CDR3 sequences comprising SEQ ID NO: 1228, SEQ ID NO: 1270, and SEQ ID NO: 1312, respectively (VL CDRs for BIIB-9-882 antibody);

[0530] (a3) VH CDR1, VH CDR2, and VH CDR3 sequences comprising SEQ ID NO: 811, SEQ ID NO: 856, and SEQ ID NO: 901, respectively (VH CDRs for BIIB-9-460 antibody), and/or VL CDR1, VL CDR2, and VL CDR3 sequences comprising SEQ ID NO: 946, SEQ ID NO: 991, and SEQ ID NO: 1036, respectively (VL CDRs for BIIB-9-460 antibody); or,

[0531] (a4) VH CDR1, VH CDR2, and VH CDR3 sequences comprising SEQ ID NO: 1108, SEQ ID NO: 1150, and SEQ ID NO: 1192, respectively (VH CDRs for BIIB-9-433 antibody), and/or VL CDR1, VL CDR2, and VL CDR3 sequences comprising SEQ ID NO: 1234, SEQ ID NO: 1276, and SEQ ID NO: 1318, respectively (VL CDRs for BIIB-9-433 antibody);

[0532] In some aspects, the anti-FIXa antibody, or antigen binding portion thereof, comprises VH CDR1, VH CDR2, and VH CDR3 sequences comprising SEQ ID NO: 822, SEQ ID NO: 867, and SEQ ID NO: 912, respectively (VH CDRs for BIIB-9-619 antibody), and/or VL CDR1, VL CDR2, and VL CDR3 sequences comprising SEQ ID NO: 957, SEQ ID NO: 1002, and SEQ ID NO: 1047, respectively (VL CDRs for BIIB-9-619 antibody).

[0533] In some aspects, the anti-FIXa antibody, or antigen binding portion thereof, comprises

(i) VH CDR1, VH CDR2, and VH CDR3 sequences comprising SEQ ID NO: 843, SEQ ID NO: 888, and SEQ ID NO: 933, respectively (VH CDRs for BIIB-9-1335 antibody), and/or VL CDR1, VL CDR2, and VL CDR3 sequences comprising SEQ ID NO: 950, SEQ ID NO: 995, and SEQ ID NO: 1040, respectively, respectively (VL CDRs for BIIB-9-1335 antibody); or,
(ii) VH CDR1, VH CDR2, and VH CDR3 sequences comprising SEQ ID NO: 844, SEQ ID NO: 889, and SEQ ID NO: 934, respectively (VH CDRs for BIIB-9-1336 antibody), and/or VL CDR1, VL CDR2, and VL CDR3 sequences comprising SEQ ID NO: 950, SEQ ID NO: 995, and SEQ ID NO: 1040, respectively (VL CDRs for BIIB-9-1336 antibody).

[0534] In some aspects, the anti-FIXa antibody, or antigen binding portion thereof, comprises a VH, wherein the VH comprises an amino acid sequence which is at least about 70%, at least about 75%, at least about 80%, at least about 85%, at least about 90%, at least about 95%, at least about 96%, at least about 97%, at least about 98%, at least about 99%, or about 100% identical to an amino acid sequence selected from the group consisting of SEQ ID NOs: 1, 3, 5, 7, 9, 11, 13, 15, 17, 19, 21, 23, 25, 27, 29, 31, 33, 35, 37, 39, 41, 43, 45, 47, 49, 51, 53, 55, 57, 59, 61, 63, 65, 67, 69, 71, 73, 75, 77, 79, 81, 83, 85, 87, 89, 91, 93, 95, 97, 99, 101, 103, 105, 107, 109, 111, 113, 115, 117, 119, 121, 123, 125, 127, 129, 131, 133, 135, 137, 139, 141, 143, 145, 147, 149, 151, 153, 155, 157, 159, 161, 163, 165, 167, 169, 171, 173, 175, 177, 179, and 181 (SEQ ID NOs: 1, 3, 5, 7, 9, 11, 13, 15, 17, 19, 21, 23, 25, 27, 29, 31, 33, 35, 37, 39, 41, 43, 45, 47, 49, 51, 53, 55, 57, 59, 61, 63, 65, 67, 69, 71, 73, 75, 77, 79, 81, 83, 85, 87, and 89 for Class I antibodies; SEQ ID NOs: 91, 93, 95, and 97 for Class II antibodies; and SEQ ID NOs: 99, 101, 103, 105, 107, 109, 111, 113, 115, 117, 119, 121, 123, 125, 127, 129, 131, 133, 135, 137, 139, 141, 143, 145, 147, 149, 151, 153, 155, 157, 159, 161, 163, 165, 167, 169, 171, 173, 175, 177, 179, and 181 for Class III antibodies).

[0535] In some aspects, the anti-FIXa antibody, or antigen binding portion thereof, comprises a VL, wherein the VL comprises an amino acid sequence which is at least about 70%, at least about 75%, at least about 80%, at least about 85%, at least about 90%, at least about 95%, at least about 96%, at least about 97%, at least about 98%, at least about 99%, or about 100% identical an the amino acid sequence selected from the group consisting of SEQ ID NOs: 191, 193, 195, 197, 199, 201, 203, 205, 207, 209, 211, 213, 215, 217, 219, 221, 223, 225, 227, 229, 231, 233, 235, 237, 239, 241, 243, 245, 247, 249, 251, 253, 255, 257, 259, 261, 263, 265, 267, 269, 271, 273, 275, 277, 279, 281, 283, 285, 287, 289, 291, 293, 295, 297, 299, 301, 303, 305, 307, 309, 311, 313, 315, 317, 319, 321, 323, 325, 327, 329, 331, 333, 335, 337, 339, 341, 343, 345, 347, 349, 351, 353, 355, 357, 359, 361, 363, 365, and 367 (SEQ ID NOs: 191, 193, 195, 197, 199, 201, 203, 205, 207, 209, 211, 213, 215, 217, 219, 221, 223, 225, 227, 229, 231, 233, 235, 237, 239, 241, 243, 245, 247, 249, 251, 253, 255, 257, 259, 261, 263, 265, 267, 269, 271, 273, and 275 for Class I antibodies; SEQ ID NOs: 277, 279, 281, and 283 for Class II antibodies; SEQ ID NOs: 285, 287, 289, 291, 293, 295, 297, 299, 301, 303, 305, 307, 309, 311, 313, 315, 317, 319, 321, 323, 325, 327, 329, 331, 333, 335, 337, 339, 341, 343, 345, 347, 349, 351, 353, 355, 357, 359, 361, 363, 365, and 367 for Class III antibodies).

[0536] In some aspects, the anti-FIXa antibody, or antigen binding portion thereof, comprises a VH and a VL, wherein

(i) the VH comprises an amino acid sequence which is at least about 70%, at least about 75%, at least about 80%, at least about 85%, at least about 90%, at least about 95%, at least about 96%, at least about 97%, at least about 98%, at least about 99%, or about 100% identical to an amino acid sequence selected from the group consisting of SEQ ID NOs: 1, 3, 5, 7, 9, 11, 13, 15, 17, 19, 21, 23, 25, 27, 29, 31, 33, 35, 37, 39, 41, 43, 45, 47, 49, 51, 53, 55, 57, 59, 61, 63, 65, 67, 69, 71, 73, 75, 77, 79, 81, 83, 85, 87, 89, 91, 93, 95, 97, 99, 101, 103, 105, 107, 109, 111, 113, 115, 117, 119, 121, 123, 125, 127, 129, 131, 133, 135, 137, 139, 141, 143, 145, 147, 149, 151, 153, 155, 157, 159, 161, 163, 165, 167, 169, 171, 173, 175, 177, 179, and 181 (SEQ ID NOs: 1, 3, 5, 7, 9, 11, 13, 15, 17, 19, 21, 23, 25, 27, 29, 31, 33, 35, 37, 39, 41, 43, 45, 47, 49, 51, 53, 55, 57, 59, 61, 63, 65, 67, 69, 71, 73, 75, 77, 79, 81, 83, 85, 87, and 89 for Class I antibodies; SEQ ID NOs: 91, 93, 95, and 97 for Class II antibodies; and SEQ ID NOs: 99, 101, 103, 105, 107, 109, 111, 113, 115, 117, 119, 121, 123, 125, 127, 129, 131, 133, 135, 137, 139, 141, 143, 145, 147, 149, 151, 153, 155, 157, 159, 161, 163, 165, 167, 169, 171, 173, 175, 177, 179, and 181 for Class III antibodies); and,
(ii) the VL comprises an amino acid sequence which is at least about 70%, at least about 75%, at least about 80%, at least about 85%, at least about 90%, at least about 95%, at least about 96%, at least about 97%, at least about 98%, at least about 99%, or about 100% identical to an amino acid sequence selected from the group consisting of SEQ ID NOs: 191, 193, 195, 197, 199, 201, 203, 205, 207, 209, 211, 213, 215, 217, 219, 221, 223, 225, 227, 229, 231, 233, 235, 237, 239, 241, 243, 245, 247, 249, 251, 253, 255, 257, 259, 261, 263, 265, 267, 269, 271, 273, 275, 277, 279, 281, 283, 285, 287, 289, 291, 293, 295, 297, 299, 301, 303, 305, 307, 309, 311, 313, 315, 317, 319, 321, 323, 325, 327, 329, 331, 333, 335, 337, 339, 341, 343, 345, 347, 349, 351, 353, 355, 357, 359, 361, 363, 365, and 367 (SEQ ID NOs: 191, 193, 195, 197, 199, 201, 203, 205, 207, 209, 211, 213, 215, 217, 219, 221, 223, 225, 227, 229, 231, 233, 235, 237, 239, 241, 243, 245, 247, 249, 251, 253, 255, 257, 259, 261, 263, 265, 267, 269, 271, 273, and 275 for Class I antibodies; SEQ ID NOs: 277, 279, 281, and 283 for Class II antibodies; SEQ ID NOs: 285, 287, 289, 291, 293, 295, 297, 299, 301, 303, 305, 307, 309, 311, 313, 315, 317, 319, 321, 323, 325, 327, 329, 331, 333, 335, 337, 339, 341, 343, 345, 347, 349, 351, 353, 355, 357, 359, 361, 363, 365, and 367 for Class III antibodies).

[0537] In certain aspects, an anti-FIXa antibody comprises a heavy chain variable region from a particular germline heavy chain immunoglobulin gene and/or a light chain variable region from a particular germline light chain immunoglobulin gene. In some embodiments, the VH sequence of the anti-FIXa antibody can be derived from any one of V, D, or J germline sequences and/or the VL sequence of the anti-FIXa antibody can be derived from any one of kappa or lambda germline sequence.

[0538] As demonstrated herein, human antibodies specific for FIXa have been prepared that comprise a heavy chain variable region that is the product of or derived from a human germline gene. Accordingly, provided herein are isolated FIXa antibodies, or antigen-binding portions thereof, comprising a heavy chain variable region that is the product of or derived from a human VH germline gene selected from the group consisting of: VH1-18, VH1-46, VH3-21, VH3-30, VH4-31, VH4-39, VH4-0B, VH5-51, and any combination thereof. In particular embodiments, the VH germline gene is selected from the group consisting of VH1-18.0, VH1-18.1, VH1-18.8, VH1-46.0, VH1-46.4, VH1-46.5, VH1-46.6, VH1-46.7, VH1-46.8, VH1-46.9, VH3-21.0, VH3-23.0, VH3-23.2, VH3-23.6, VH3-30.0, VH4-31.5, VH4-39.0, VH4-39.5. VH4-0B.4, VH5-51.1, and any combination thereof.

[0539] In other aspects, provided herein are isolated FIXa antibodies, or antigen-binding portions thereof, comprising a heavy chain variable region that is the product of or derived from a human VL germline gene selected from the group consisting of: VK1-05, VK1-12, VK1-39, VK2-28, VK3-11, VK3-15, VK3-20, VK4-01, and any combination thereof. In particular embodiments, the VL germline gene is selected from the group consisting of VK1-05.6, VK1-05.12, VK1-12.0, VK1-12.4, VK1-12.7, VK1-12.10, VK1-12.15, VK1-39.0, VK1-39.3, VK1-39.15, VK2-28.0, VK2-28.1, VK2-28.5, VK3-11.0, VK3-11.2, VK3-11.6, VK3-11.14, VK3-15.0, VK3-15.8, VK3-15.10, VK3-20.0, VK3-20.1, VK3-20.4, VK3-20.5, VK4-01.0, VK4-01.4, VK4-01.20, and any combination thereof.

[0540] Antibodies described herein include those comprising a heavy chain variable region that is the product of or derived from one of the above-listed human germline VH genes and also comprising a light chain variable region that is the product of or derived from one of the above-listed human germline VK genes, as shown in the Figures.

[0541] As used herein, a human antibody comprises heavy and light chain variable regions that are “the product of or “derived from” a particular germline sequence if the variable regions of the antibody are obtained from a system that uses human germline immunoglobulin genes. Such systems include immunizing a transgenic mouse carrying human immunoglobulin genes with the antigen of interest or screening a human immunoglobulin gene library displayed on phage with the antigen of interest. A human antibody that is “the product of or “derived from” a human germline immunoglobulin sequence can be identified as such by comparing the amino acid sequence of the human antibody to the amino acid sequences of human germline immunoglobulins and selecting the human germline immunoglobulin sequence that is closest in sequence (i.e., greatest % identity) to the sequence of the human antibody. A human antibody that is “the product of” or “derived from” a particular human germline immunoglobulin sequence can contain amino acid differences as compared to the germline sequence, due to, for example, naturally-occurring somatic mutations or intentional introduction of site-directed mutation. However, a selected human antibody typically is at least 90% identical in amino acids sequence to an amino acid sequence encoded by a human germline immunoglobulin gene and contains amino acid residues that identify the human antibody as being human when compared to the germline immunoglobulin amino acid sequences of other species (e.g., murine germline sequences). In certain cases, a human antibody can be at least 95%, or even at least 96%, 97%, 98%, or 99% identical in amino acid sequence to the amino acid sequence encoded by the germline immunoglobulin gene. Typically, a human antibody derived from a particular human germline sequence will display no more than 10 amino acid differences from the amino acid sequence encoded by the human germline immunoglobulin gene. In certain cases, the human antibody can display no more than 5, or even no more than 4, 3, 2, or 1 amino acid difference from the amino acid sequence encoded by the germline immunoglobulin gene.

[0542] In some aspects, the anti-FIXa antibody, or antigen binding portion thereof, comprises a VH and a VL, wherein

(a1) VH comprises an amino acid sequence at least 70%, at least 80%, at least 90%, at least 95%, at least 96%, at least 97%, at least 98%, at least 99%, or 100% identical to SEQ ID NO: 31 and VL comprises an amino acid sequence at least 70%, at least 80%, at least 90%, at least 95%, at least 96%, at least 97%, at least 98%, at least 99%, or 100% identical to SEQ ID NO: 221 (VH and VL of BIIB-9-484, respectively);
(a2) VH comprises an amino acid sequence at least 70%, at least 80%, at least 90%, at least 95%, at least 96%, at least 97%, at least 98%, at least 99%, or 100% identical to SEQ ID NO: 19 and VL comprises an amino acid sequence at least 70%, at least 80%, at least 90%, at least 95%, at least 96%, at least 97%, at least 98%, at least 99%, or 100% identical to SEQ ID 209 (VH and VL of BIIB-9-440, respectively);
(a3) VH comprises an amino acid sequence at least 70%, at least 80%, at least 90%, at least 95%, at least 96%, at least 97%, at least 98%, at least 99%, or 100% identical to SEQ ID NO: 115 and VL comprises an amino acid sequence at least 70%, at least 80%, at least 90%, at least 95%, at least 96%, at least 97%, at least 98%, at least 99%, or 100% identical to SEQ ID NO: 301 (VH and VL of BIIB-9-882, respectively);
(a4) VH comprises an amino acid sequence at least 70%, at least 80%, at least 90%, at least 95%, at least 96%, at least 97%, at least 98%, at least 99%, or 100% identical to SEQ ID NO: 23 and VL comprises an amino acid sequence at least 70%, at least 80%, at least 90%, at least 95%, at least 96%, at least 97%, at least 98%, at least 99%, or 100% identical to SEQ ID NO: 213 (VH and VL of BIIB-9-460, respectively);
(a5) VH comprises an amino acid sequence at least 70%, at least 80%, at least 90%, at least 95%, at least 96%, at least 97%, at least 98%, at least 99%, or 100% identical to SEQ ID NO: 127 and VL comprises an amino acid sequence at least 70%, at least 80%, at least 90%, at least 95%, at least 96%, at least 97%, at least 98%, at least 99%, or 100% identical to SEQ ID NO: 313 (VH and VL of BIIB-9-433, respectively);
(a6) VH comprises an amino acid sequence at least 70%, at least 80%, at least 90%, at least 95%, at least 96%, at least 97%, at least 98%, at least 99%, or 100% identical to SEQ ID NO: 45 and VL comprises an amino acid sequence at least 70%, at least 80%, at least 90%, at least 95%, at least 96%, at least 97%, at least 98%, at least 99%, or 100% identical to SEQ ID NO: 235 (VH and VL of BIIB-9-619, respectively);
(a7) VH comprises an amino acid sequence at least 70%, at least 80%, at least 90%, at least 95%, at least 96%, at least 97%, at least 98%, at least 99%, or 100% identical to SEQ ID NO: 87 and VL comprises an amino acid sequence at least 70%, at least 80%, at least 90%, at least 95%, at least 96%, at least 97%, at least 98%, at least 99%, or 100% identical to SEQ ID NO: 221 (VH and VL of BIIB-9-1335, respectively); or
(a8) VH comprises an amino acid sequence at least 70%, at least 80%, at least 90%, at least 95%, at least 96%, at least 97%, at least 98%, at least 99%, or 100% identical to SEQ ID NO: 89 and VL comprises an amino acid sequence at least 70%, at least 80%, at least 90%, at least 95%, at least 96%, at least 97%, at least 98%, at least 99%, or 100% identical to SEQ ID NO: 221 (VH and VL of BIIB-9-1336, respectively).

[0543] In some aspects, the anti-FIXa antibody, or antigen binding portion thereof, binds to the same epitope as BIIB-9-1336. In other aspects, the anti-FIXa antibody, or antigen binding portion thereof, binds to an epitope overlapping BIIB-9-1336's epitope. In some embodiments, the anti-FIXa antibody, or antigen binding portion thereof, binds to an epitope region comprising at least one amino acid located between chymotrypsinogen numbering positions 91 and 101, 125 and 128, 165 and 179, or 232 and 241 in the sequence of the heavy chain of FIXa (corresponding to positions 76 to 88, 112 to 115, 153 to 167, and 222 to 231, respectively in SEQ ID NO: 758).

[0544] As used herein, the phrase “chymotrypsinogen numbering amino acid residue” and grammatical variants thereof refers to the description of certain amino acids in FIX by homology to the serine protease chymotrypsinogen. In the present disclosure the chymotrypsinogen numbering within the serine protease domain was used according to Hopfner et al. (EMBO J. 1997; 16:6626-35). For the present disclosure the chymotrypsinogen numbering is only used when explicitly indicated herein. The correspondence between the disclosed chymotripsinogen numbering amino acid residues and the amino acid position is SEQ ID NO: 758 is provided in the table below:

Correspondence between FIXa chymotrypsinogen
numbering and SEQ ID NO: 758 positions

| FIXa chymotrypsinogen numbering | SEQ ID NO: 758 |
|---|---|
| amino acid residue | amino acid residue |
| H91 | H76 |
| H92 | H77 |
| N93 | N78 |
| H101 | H88 |
| D125 | D112 |
| K126 | K113 |
| E127 | E114 |
| Y128 | Y115 |
| R165 | R153 |
| Y177 | Y165 |
| N178 | N166 |
| N179 | N167 |
| S232 | S222 |
| R233 | R223 |
| Y234 | Y224 |
| V235 | V225 |
| N236 | N226 |
| W237 | W227 |
| E240 | E230 |
| K241 | K231 |
| N100 | N87 |
| K132 | K121 |
| Y137 | Y126 |
| R170 | R158 |
| T172 | T160 |
| F174 | F162 |
| T175 | T163 |
| H185 | H174 |
| E202 | E192 |
| G205 | G195 |

[0545] In some aspects, the anti-FIXa antibody, or antigen binding portion thereof, binds to an epitope comprising at least one of chymotrypsinogen numbering amino acid residues H91, H92, N93, H101, D125, K126, E127, Y128, R165, Y177, N178, N179, S232, R233, Y234, V235, N236, W237, E240, and K241 in the sequence of the heavy chain of FIXa (corresponding to positions H76, H77, N78, H88, D112, K113, E114, Y115, R153, Y165, N166, N167, S222, R223, Y224, V225, N226, W227, E230, and K231, respectively in SEQ ID NO: 758). In some aspects, the anti-FIXa antibody, or antigen binding portion thereof, binds to an epitope comprising at least 2, 3, 4, 5, 6, 7, 8, 9, 10, 11, 12, 13, 14, 15, 16, 17, 18, or 19 amino acid residues selected from the group consisting chymotrypsinogen numbering amino acid residues H91, H92, N93, H101, D125, K126, E127, Y128, R165, Y177, N178, N179, S232, R233, Y234, V235, N236, W237, E240, and K241 in the sequence of the heavy chain of FIXa (corresponding to positions H76, H77, N78, H88, D112, K113, E114, Y115, R153, Y165, N166, N167, S222, R223, Y224, V225, N226, W227, E230, and K231, respectively in SEQ ID NO: 758).

[0546] In some aspects, the anti-FIXa antibody, or antigen binding portion thereof, binds to an epitope comprises chymotrypsinogen numbering amino acid residues H91, H92, N93, H101, D125, K126, E127, Y128, R165, Y177, N178, N179, S232, R233, Y234, V235, N236, W237, E240, and K241 in the sequence of the heavy chain of FIXa (corresponding to positions H76, H77, N78, H88, D112, K113, E114, Y115, R153, Y165, N166, N167, S222, R223, Y224, V225, N226, W227, E230, and K231, respectively in SEQ ID NO: 758).

[0547] In some aspects, the anti-FIXa antibody, or antigen binding portion thereof, binds to an epitope consisting of chymotrypsinogen numbering amino acid residues H91, H92, N93, H101, D125, K126, E127, Y128, R165, Y177, N178, N179, S232, R233, Y234, V235, N236, W237, E240, and K241 in the sequence of the heavy chain of FIXa (corresponding to positions H76, H77, N78, H88, D112, K113, E114, Y115, R153, Y165, N166, N167, S222, R223, Y224, V225, N226, W227, E230, and K231, respectively in SEQ ID NO: 758).

[0548] In some aspects, the anti-FIXa antibody, or antigen binding portion thereof, binds to an epitope comprising chymotrypsinogen numbering amino acid residues N93, R165, N178, and R233 in the sequence of the heavy chain of FIXa (corresponding to positions N78, R153, N166 and R223, respectively in SEQ ID NO: 758).

[0549] In some aspects, the anti-FIXa antibody, or antigen binding portion thereof, binds to an epitope which does not comprise at least one of chymotrypsinogen numbering amino acid residues N100, K132, Y137, R170, T172, F174, T175, H185, E202, and G205 in the sequence of the heavy chain of FIXa (corresponding to positions N87, K121, Y126, R158, T160, F162, T163, H174, E192 and G195, respectively in SEQ ID NO: 758). In some aspects, the anti-FIXa antibody, or antigen binding portion thereof, binds to an epitope which does not comprise chymotrypsinogen numbering amino acid residues N100, K132, Y137, R170, T172, F174, T175, H185, E202, and G205 in the sequence of the heavy chain of FIXa (corresponding to positions N87, K121, Y126, R158, T160, F162, T163, H174, E192 and G195, respectively in SEQ ID NO: 758).

[0550] In some aspects, the anti-FIXa antibody, or antigen binding portion thereof, binds to an epitope comprising at least one amino acid residue in the light chain of FIXa (SEQ ID NO:756). In some aspects, the epitope in the light chain of FIXa (SEQ ID NO:756) that the anti-FIXa antibody, or antigen binding portion thereof binds to is K100.

[0551] In some aspects, the anti-FIXa antibody, or antigen binding portion thereof, binds to an epitope comprising chymotrypsinogen numbering amino acid residues H91, H92, N93, H101, D125, K126, E127, Y128, R165, Y177, N178, N179, S232, R233, Y234, V235, N236, W237, E240, and K241 in the sequence of the heavy chain of FIXa (corresponding to positions H76, H77, N78, H88, D112, K113, E114, Y115, R153, Y165, N166, N167, S222, R223, Y224, V225, N226, W227, E230, and K231, respectively in SEQ ID NO: 758) and amino acid residue K100 of the sequence of the light chain of FIXa (SEQ ID NO:756). In some aspects, the anti-FIXa antibody, or antigen binding portion thereof, binds to an epitope consisting of chymotrypsinogen numbering amino acid residues H91, H92, N93, H101, D125, K126, E127, Y128, R165, Y177, N178, N179, S232, R233, Y234, V235, N236, W237, E240, and K241 in the sequence of the heavy chain of FIXa (corresponding to positions H76, H77, N78, H88, D112, K113, E114, Y115, R153, Y165, N166, N167, S222, R223, Y224, V225, N226, W227, E230, and K231, respectively in SEQ ID NO: 758) and amino acid residue K100 of the sequence of the light chain of FIXa (SEQ ID NO:756).

[0552] In some aspects, the anti-FIXa antibody, or antigen binding portion thereof, binds to an epitope that overlaps the binding site of FVIIIa to FIXa. In some aspects, the anti-FIXa antibody, or antigen binding portion thereof, cross-competes with FVIIIa for binding to FIXa. In some aspects, the anti-FXa antibody, or antigen binding portion thereof, blocks binding of FVIIIa to FIXa.

[0553] In some aspects, the anti-FIXa antibody, or antigen binding portion thereof, which specifically binds to FIXa, comprises VH CDR1, CDR2, and CDR3 sequences, wherein the VH CDR1 sequence comprises a VH CDR1 sequence selected from the group consisting of VH CDR1 sequences disclosed in TABLE 7 or a VH CDR1 sequence disclosed in TABLE 7 with one or two mutations.

[0554] In some aspects, the anti-FIXa antibody, or antigen binding portion thereof, which specifically binds to FIXa, comprises VH CDR1, CDR2, and CDR3 sequences, wherein the VH CDR2 sequence comprises a VH CDR2 sequence selected from the group consisting of VH CDR2 sequences disclosed in TABLE 7 or a VH CDR2 sequence disclosed in TABLE 7 with one or two mutations.

[0555] In some aspects, the anti-FIXa antibody, or antigen binding portion thereof, which specifically binds to FIXa, comprises VH CDR1, CDR2, and CDR3 sequences, wherein the VH CDR3 sequence comprises a VH CDR3 sequence selected from the group consisting of VH CDR3 sequence disclosed in TABLE 7 or a VH CDR3 sequence disclosed in TABLE 7 with one or two mutations.

[0556] In some aspects, the anti-FIXa antibody, or antigen binding portion thereof, which specifically binds to FIXa, comprises VL CDR1, CDR2, and CDR3 sequences, wherein the VL CDR1 sequence comprises a VL CDR1 sequence selected from the group consisting of VL CDR1 sequences disclosed in TABLE 7 or a VL CDR1 sequence disclosed in TABLE 7 with one or two mutations.

[0557] In some aspects, the anti-FIXa antibody, or antigen binding portion thereof, which specifically binds to FIXa, comprises VL CDR1, CDR2, and CDR3 sequences, wherein the VL CDR2 sequence comprises a VL CDR2 sequence selected from the group consisting of VL CDR2 sequences disclosed in TABLE 7 or a VL CDR2 sequence disclosed in TABLE 7 with one or two mutations.

[0558] In some aspects, the anti-FIXa antibody, or antigen binding portion thereof, which specifically binds to FIXa, comprises VL CDR1, CDR2, and CDR3 sequences, wherein the VL CDR3 sequence comprises a VL CDR3 sequence selected from the group consisting of VL CDR3 sequences disclosed in TABLE 7 or a VL CDR3 sequence disclosed in TABLE 7 with one or two mutations.

[0559] In some aspects, the isolated anti-FIXa antibody, or antigen binding portion thereof, comprises VH CDR1, CDR2, and CDR3 sequences, and VL CDR1, CDR2, and CDR3 sequences, wherein the VH CDR1, CDR2, and CDR3 sequences and the VL CDR1, CDR2, and CDR3 sequences comprise VH CDR1, CDR2, and CDR3 sequences and VL CDR1, CDR2, and CDR3 sequences disclosed in TABLE 7, respectively.

[0560] In some aspects, the isolated anti-FIXa antibody, or antigen binding portion thereof, comprises VH CDR1, CDR2 and CDR3, wherein
[0561] (i) the VH CDR1 comprises the amino acid sequence FTFX₁SX₂X₃MX₄ (SEQ ID NO: 2194), wherein X₁ is S, G or E, X₂ is Y or F, X₃ is S, E, G, or D, and X₄ is N, V, A, or T; and/or,
[0562] (ii) the VH CDR2 comprises the amino acid sequence X₅ISX₆X₇X₈X₉X₁₀IYYADSVKG (SEQ ID NO: 2195), wherein X₅ is S, A, Y, or G, X₆ is S or A, X₇ is S, A, or G, X₈ is S, G, or D, X₉ is S, T, or G, and X₁₀ is Y or T; and/or,
[0563] (iii) the VH CDR3 comprises the amino acid sequence ARDX₁₁GGYAGYYGMDV (SEQ ID NO: 2196), wherein X₁₁ is L or V.

[0564] In some aspects, the isolated anti-FIXa antibody, or antigen binding portion thereof, comprises VL CDR1, CDR2 and CDR3, wherein

[0565] (i) the VL CDR1 comprises the amino acid sequence QASQDIANYLN (SEQ ID NO:2116); and/or,

[0566] (ii) the VL CDR2 comprises the amino acid sequence DASNLET (SEQ ID NO:2142); and/or,

[0567] (iii) the VL CDR3 comprises the amino acid sequence QQYANFPYT (SEQ ID NO:2168).

[0568] In some aspects, the isolated anti-FIXa antibody, or antigen binding portion thereof, comprises VH CDR1, CDR2 and CDR3, wherein

[0569] (i) the VH CDR1 comprises the amino acid sequence FTFX₁SX₂X₃MX₄(SEQ ID NO: 2194), wherein X₁ is S, G or E, X₂ is Y or F, X₃ is S, E, G, or D, and X₄ is N, V, A, or T; and/or,

[0570] (ii) the VH CDR2 comprises the amino acid sequence X₅ISX₆X₇X₈X₉X₁₀IYYADSVKG (SEQ ID NO: 2195), wherein X₅ is S, A, Y, or G, X₆ is S or A, X₇ is S, A, or G, X₈ is S, G, or D, X₉ is S, T, or G, and X₁₀ is Y or T; and/or,

[0571] (iii) the VH CDR3 comprises the amino acid sequence ARDX₁₁GGYAGYYGMDV (SEQ ID NO: 2196), wherein X₁₁ is L or V; and,

further comprises VL CDR1, CDR2 and CDR3, wherein VL CDR1 comprises the amino acid sequence QASQDIANYLN (SEQ ID NO:2116); and/or, VL CDR2 comprises the amino acid sequence DASNLET (SEQ ID NO:2142); and/or, VL CDR3 comprises the amino acid sequence QQYANFPYT (SEQ ID NO:2168).

[0572] In some aspects the anti-FIXa antibody, or antigen binding portion thereof, comprises VH CDR1, CDR2, and CDR3 sequences comprising a VH CDR1 selected from SEQ ID NOs: 2038 to 2047, a VH CDR2 selected from SEQ ID NOs: 2064 to 2073, and a VH CDR3 selected from SEQ ID NOs: 2090 to 2099, and/or VL CDR1, CDR2, and CDR3 sequences comprising a VL CDR1 selected from SEQ ID NOs: 2116 to 2125, a VL CDR2 selected from SEQ ID NOs: 2142 to 2151, and a VL CDR3 selected from SEQ ID NOs: 2168 to 2177.

[0573] In some aspects, the isolated anti-FIXa antibody, or antigen binding portion thereof, comprises VH CDR1, CDR2 and CDR3, wherein
[0574] (i) the VH CDR1 comprises the amino acid sequence FTFGSYDMN (SEQ ID NO: 2048); and/or,
[0575] (ii) the VH CDR2 comprises the amino acid sequence SISX₁X₂X₃SYIX₄YAX₅SVKG (SEQ ID NO: 2197), wherein X₁ is S or D, X₂ is G or S, X₃ is E or A, X₄ is Y or A, and X₅ is E or D; and/or,
[0576] (iii) the VH CDR3 comprises the amino acid sequence X₆RDVX₇GYAGX₈YGMDV (SEQ ID NO: 2198), wherein X₆ is A or V, X₇ is G or S, and X₈ is Y or F.

[0577] In some aspects, the isolated anti-FIXa antibody, or antigen binding portion thereof, comprises VL CDR1, CDR2 and CDR3, wherein
[0578] (i) the VL CDR1 comprises the amino acid sequence X₁AX₂X₃X₄IX₅X₆YLN (SEQ ID NO: 2199), wherein X₁ is Q, G, or E, X₂ is S or N, X₃ is Q or E, X₄ is D or Y, X₅ is A or S, X₆ is N or D; and/or,
[0579] (ii) the VL CDR2 comprises the amino acid sequence DAX₇NLX₈X₉(SEQ ID NO: 2200), wherein X₇ is S or A, X₈ is E, H or Q, and X₉ is T or Y; and/or,
[0580] (iii) the VL CDR3 comprises the amino acid sequence X₁₀QYAX₁₁FPYT (SEQ ID NO: 2201), wherein X₁₀ is Q or S, and X₁₁ is N or R.

[0581] In some aspects, the isolated anti-FIXa antibody, or antigen binding portion thereof, comprises VH CDR1, CDR2 and CDR3, wherein
[0582] (i) the VH CDR1 comprises the amino acid sequence FTFGSYDMN (SEQ ID NO: 2048); and/or,
[0583] (ii) the VH CDR2 comprises the amino acid sequence SISX₁X₂X₃SYIX₄YAX₅SVKG (SEQ ID NO: 2197), wherein X₁ is S or D, X₂ is G or S, X₃ is E or A, X₄ is Y or A, and X₅ is E or D; and/or,
[0584] (iii) the VH CDR3 comprises the amino acid sequence X₆RDVX₇GYAGX₈YGMDV (SEQ ID NO: 2198), wherein X₆ is A or V, X₇ is G or S, and X₈ is Y or F; and
   further comprises VL CDR1, CDR2 and CDR3, wherein
[0585] (iv) the VL CDR1 comprises the amino acid sequence X₁AX₂X₃X₄IX₅X₆YLN (SEQ ID NO: 2199), wherein X₁ is Q, G, or E, X₂ is S or N, X₃ is Q or E, X₄ is D or Y, X₅ is A or S, X₆ is N or D; and/or,
[0586] (v) the VL CDR2 comprises the amino acid sequence DAX₇NLX₈X₉(SEQ ID NO: 2200), wherein X₇ is S or A, X₈ is E, H or Q, and X₉ is T or Y; and/or,
[0587] (vi) the VL CDR3 comprises the amino acid sequence X₁₀QYAX₁₁FPYT (SEQ ID NO: 2201), wherein X₁₀ is Q or S, and X₁₁ is N or R.

[0588] In some aspects, the anti-FIXa antibody, or antigen binding portion thereof, comprises VH CDR1, CDR2, and CDR3 sequences comprising a VH CDR1 selected from SEQ ID NOs: 2048 to 2052, a VH CDR2 selected from SEQ ID Nos: 2074 to 2078, and a VH CDR3 selected from SEQ ID NOs: 2100 to 2104, and/or VL CDR1, CDR2, and CDR3 sequences comprising a VL CDR1 selected from SEQ ID NOs: 2126 to 2130, a VL CDR2 selected from SEQ ID NOs: 2152 to 2156, and a VL CDR3 selected from SEQ ID NOs: 2178 to 2182.

[0589] In some aspects, the isolated anti-FIXa antibody, or antigen binding portion thereof, comprises VH CDR1, CDR2 and CDR3, wherein
[0590] (i) the VH CDR1 comprises the amino acid sequence YTFX₁X₂YX₃MH (SEQ ID NO: 2202), wherein X₁ is T or H, X₂ is S, G, or H, and X₃ is Y or P; and/or,
[0591] (ii) the VH CDR2 comprises the amino acid sequence X₄INPSX₅GX₆TX₇YAQKFQG (SEQ ID NO: 2203), wherein X₄ is I or S, X₅ is G or R, X₆ is S or R, and X₇ is S or E; and/or,
[0592] (iii) the VH CDR3 comprises the amino acid sequence ARDGPX₈X₉X₁₀DYYMDV (SEQ ID NO: 2204), wherein X₈ is R or Q, X₉ is V, D, L or E, and X₁₀ is S or V.

[0593] In some aspects, the isolated anti-FIXa antibody, or antigen binding portion thereof, comprises VL CDR1, CDR2 and CDR3, wherein the VL CDR1 comprises the amino acid sequence RASQSVSSYLA (SEQ ID NO:2116); and/or, the VL CDR2 comprises the amino acid sequence DASNRAT (SEQ ID NO:2116); and/or, (iii) the VL CDR3 comprises the amino acid sequence QQRDNWPFT (SEQ ID NO:2116).

[0594] In some aspects, the isolated anti-FIXa antibody, or antigen binding portion thereof, comprises VH CDR1, CDR2 and CDR3, wherein
[0595] (i) the VH CDR1 comprises the amino acid sequence YTFX₁X₂YX₃MH (SEQ ID NO: 2202), wherein X₁ is T or H, X₂ is S, G, or H, and X₃ is Y or P; and/or,
[0596] (ii) the VH CDR2 comprises the amino acid sequence X₄INPSX₅GX₆TX₇YAQKFQG (SEQ ID NO: 2203), wherein X₄ is I or S, X₅ is G or R, X₆ is S or R, and X₇ is S or E; and/or,
[0597] (iii) the VH CDR3 comprises the amino acid sequence ARDGPX₈X₉X₁₀DYYMDV (SEQ ID NO: 2204), wherein X₈ is R or Q, X₉ is V, D, L or E, and X₁₀ is S or V; and
   further comprises VL CDR1, CDR2 and CDR3, wherein the VL CDR1 comprises the amino acid sequence RASQSVSSYLA (SEQ ID NO:2116); and/or, the VL CDR2 comprises the amino acid sequence DASNRAT (SEQ ID NO:2116); and/or, (iii) the VL CDR3 comprises the amino acid sequence QQRDNWPFT (SEQ ID NO:2116).

[0598] In some aspects, the anti-FIXa antibody, or antigen binding portion thereof, comprises VH CDR1, CDR2, and CDR3 sequences comprising a VH CDR1 selected from SEQ ID NOs: 2053 to 2057, a VH CDR2 selected from SEQ ID NOs: 2079 to 2083, and a VH CDR3 selected from SEQ ID NOs: 2105 to 2109, and/or VL CDR1, CDR2, and CDR3 sequences comprising a VL CDR1 selected from SEQ ID NOs: 2131 to 2135, a VL CDR2 selected from SEQ ID NOs: 2157 to 2161, and a VL CDR3 selected from SEQ ID NOs: 2183 to 2187.

[0599] In some aspects, the isolated anti-FIXa antibody, or antigen binding portion thereof, comprises VH CDR1, CDR2 and CDR3, wherein
[0600] (i) the VH CDR1 comprises the amino acid sequence GSIX₁SX₂X₃YX₄WX₅(SEQ ID NO: 2205), wherein X₁ is S or A, X₂ is S, T, G, or V, X₃ is S or A, X₄ is Y or A, and X₅ is G, V, N, or S; and/or
[0601] (ii) the VH CDR2 comprises the amino acid sequence X₆IX₇X₈X₉GX₁₀TX₁₁YNPSLKS (SEQ ID NO: 2206), wherein X₆ is S or Y, X₇ is S, Y, R, T or Q, X₈ is Y, G, P or A, X₉ is S or Q, X₁₀ is S or K, and X₁₁ is Y or Q; and/or,
[0602] (iii) the VH CDR3 comprises the amino acid sequence ARDKYQDYSX₁₂DI, wherein X₁₂ is F or V (SEQ ID NO: 2207).

[0603] In some aspects, the isolated anti-FIXa antibody, or antigen binding portion thereof, comprises VL CDR1, CDR2 and CDR3, wherein the VL CDR1 comprises the amino acid sequence RASQGIDSWLA (SEQ ID NO:2136); and/or, the VL CDR2 comprises the amino acid sequence AASSLQS (SEQ ID NO:2162); and/or, the VL CDR3 comprises the amino acid sequence QQANFLPFT (SEQ ID NO:2188).

[0604] In some aspects, the isolated anti-FIXa antibody, or antigen binding portion thereof, comprises VH CDR1, CDR2 and CDR3, wherein
[0605] (i) the VH CDR1 comprises the amino acid sequence GSIX₁SX₂X₃YX₄WX₅ (SEQ ID NO: 2205), wherein X₁ is S or A, X₂ is S, T, G, or V, X₃ is S or A, X₄ is Y or A, and X₅ is G, V, N, or S; and/or,
[0606] (ii) the VH CDR2 comprises the amino acid sequence X₆IX₇X₈X₉GX₁₀TX₁₁YNPSLKS (SEQ ID NO: 2206), wherein X₆ is S or Y, X₇ is S, Y, R, T or Q, X₈ is Y, G, P or A, X₉ is S or Q, X₁₀ is S or K, and X₁₁ is Y or Q; and/or,
[0607] (iii) the VH CDR3 comprises the amino acid sequence ARDKYQDYSX₁₂DI (SEQ ID NO: 2207), wherein X₁₂ is F or V; and
   further comprises VL CDR1, CDR2 and CDR3, wherein the VL CDR1 comprises the amino acid sequence RASQGIDSWLA (SEQ ID NO:2136); and/or, the VL CDR2 comprises the amino acid sequence AASSLQS (SEQ ID NO:2162); and/or, and the VL CDR3 comprises the amino acid sequence QQANFLPFT (SEQ ID NO:2188).

[0608] In some aspects, the anti-FIXa antibody, or antigen binding portion thereof, comprises VH CDR1, CDR2, and CDR3 sequences comprising a VH CDR1 selected from SEQ ID NOs: 2058 to 2063, a VH CDR2 selected from SEQ ID NOs: 2084 to 2089, and a VH CDR3 selected from SEQ ID NOs: 2110 to 2115, and/or VL CDR1, CDR2, and CDR3 sequences comprising a VL CDR1 selected from SEQ ID NOs: 2136 to 2141, a VL CDR2 selected from SEQ ID NOs: 2162 to 2167, and a VL CDR3 selected from SEQ ID NOs: 2188 to 2193.

[0609] In some aspects, the anti-FIXa antibody, or antigen binding portion thereof, comprises a VH and a VL, wherein the VH comprises an amino acid sequence which is at least about 80%, at least about 85%, at least about 90%, at least about 95%, at least about 96%, at least about 97%, at least about 98%, at least about 99%, or about 100% identical to the amino acid sequence selected from the group consisting of SEQ ID NOs: 1935, 1939, 1943, 1947, 1951, 1955, 1959, 1963, 1967, 1971, 1975, 1979, 1983, 1987, 1991, 1995, 1999, 2003, 2007, 2011, 2015, 2019, 2023, 2027, 2031, and 2035.

[0610] In some aspects, the anti-FIXa antibody, or antigen binding portion thereof, comprises a VH and a VL, wherein the VL comprises an amino acid sequence which is at least about 80%, at least about 85%, at least about 90%, at least about 95%, at least about 96%, at least about 97%, at least about 98%, at least about 99%, or about 100% identical to an amino acid sequence selected from the group consisting of SEQ ID NOs: 1937, 1941, 1945, 1949, 1953, 1957, 1961, 1965, 1969, 1973, 1977, 1981, 1985, 1989, 1993, 1997, 2001, 2005, 2009, 2013, 2017, 2021, 2025, 2029, 2033, and 2037.

[0611] In some aspects, the anti-FIXa antibody, or antigen binding portion thereof, comprises a VH and a VL, wherein

(i) the VH comprises an amino acid sequence which is at least about 80%, at least about 85%, at least about 90%, at least about 95%, at least about 96%, at least about 97%, at least about 98%, at least about 99%, or about 100% identical to the amino acid sequence selected from the group consisting of SEQ ID NOs: 1935, 1939, 1943, 1947, 1951, 1955, 1959, 1963, 1967, 1971, 1975, 1979, 1983, 1987, 1991, 1995, 1999, 2003, 2007, 2011, 2015, 2019, 2023, 2027, 2031, and 2035; and/or,
(ii) the VL comprises an amino acid sequence which is at least about 80%, at least about 85%, at least about 90%, at least about 95%, at least about 96%, at least about 97%, at least about 98%, at least about 99%, or about 100% identical to an amino acid sequence selected from the group consisting of SEQ ID NOs: 1937, 1941, 1945, 1949, 1953, 1957, 1961, 1965, 1969, 1973, 1977, 1981, 1985, 1989, 1993, 1997, 2001, 2005, 2009, 2013, 2017, 2021, 2025, 2029, 2033, and 2037.

[0612] In some aspects, the anti-FIXa antibody, or antigen binding portion thereof, comprises a VH and a VL, wherein the VH comprises an amino acid sequence at least 70%, at least 80%, at least 90%, at least 95%, at least 96%, at least 97%, at least 98%, at least 99%, or 100% identical to SEQ ID NO: 89 and VL comprises an amino acid sequence at least 70%, at least 80%, at least 90%, at least 95%, at least 96%, at least 97%, at least 98%, at least 99%, or 100% identical to SEQ ID NO: 221 (VH and VL of BIIB-9-1336, respectively).

[0613] In some aspects, the anti-FIXa antibody, or antigen binding portion thereof, comprises a VH and a VL, wherein
[0614] (a1) the VH comprises an amino acid sequence at least 70%, at least 80%, at least 90%, at least 95%, at least 96%, at least 97%, at least 98%, at least 99%, or 100% identical to SEQ ID NOs: 1935 and the VL comprises an amino acid sequence at least 70%, at least 80%, at least 90%, at least 95%, at least 96%, at least 97%, at least 98%, at least 99%, or 100% identical to SEQ ID NO: 1937;
[0615] (a2) the VH comprises an amino acid sequence at least 70%, at least 80%, at least 90%, at least 95%, at least 96%, at least 97%, at least 98%, at least 99%, or 100% identical to SEQ ID NOs: 1939 and the VL comprises an amino acid sequence at least 70%, at least 80%, at least 90%, at least 95%, at least 96%, at least 97%, at least 98%, at least 99%, or 100% identical to SEQ ID NO: 1941;
[0616] (a3) the VH comprises an amino acid sequence at least 70%, at least 80%, at least 90%, at least 95%, at least 96%, at least 97%, at least 98%, at least 99%, or 100% identical to SEQ ID NOs: 1943 and the VL comprises an amino acid sequence at least 70%, at least 80%, at least 90%, at least 95%, at least 96%, at least 97%, at least 98%, at least 99%, or 100% identical to SEQ ID NO: 1945;
[0617] (a4) the VH comprises an amino acid sequence at least 70%, at least 80%, at least 90%, at least 95%, at least 96%, at least 97%, at least 98%, at least 99%, or 100% identical to SEQ ID NOs: 1947 and the VL comprises an amino acid sequence at least 70%, at least 80%, at least 90%, at least 95%, at least 96%, at least 97%, at least 98%, at least 99%, or 100% identical to SEQ ID NO: 1949;
[0618] (a5) the VH comprises an amino acid sequence at least 70%, at least 80%, at least 90%, at least 95%, at least 96%, at least 97%, at least 98%, at least 99%, or 100% identical to SEQ ID NOs: 1951 and the VL comprises an amino acid sequence at least 70%, at least 80%, at least 90%, at least 95%, at least 96%, at least 97%, at least 98%, at least 99%, or 100% identical to SEQ ID NO: 1953;
[0619] (a6) the VH comprises an amino acid sequence at least 70%, at least 80%, at least 90%, at least 95%, at least 96%, at least 97%, at least 98%, at least 99%, or 100% identical to SEQ ID NOs: 1955 and the VL comprises an amino acid sequence at least 70%, at least 80%, at least 90%, at least 95%, at least 96%, at least 97%, at least 98%, at least 99%, or 100% identical to SEQ ID NO: 1957;
[0620] (a7) the VH comprises an amino acid sequence at least 70%, at least 80%, at least 90%, at least 95%, at least 96%, at least 97%, at least 98%, at least 99%, or 100% identical to SEQ ID NOs: 1959 and the VL comprises an amino acid sequence at least 70%, at least 80%, at least 90%, at least 95%, at least 96%, at least 97%, at least 98%, at least 99%, or 100% identical to SEQ ID NO: 1961;
[0621] (a8) the VH comprises an amino acid sequence at least 70%, at least 80%, at least 90%, at least 95%, at least 96%, at least 97%, at least 98%, at least 99%, or 100% identical to SEQ ID NOs: 1963 and the VL comprises an amino acid sequence at least 70%, at least 80%, at least 90%, at least 95%, at least 96%, at least 97%, at least 98%, at least 99%, or 100% identical to SEQ ID NO: 1965;
[0622] (a9) the VH comprises an amino acid sequence at least 70%, at least 80%, at least 90%, at least 95%, at least 96%, at least 97%, at least 98%, at least 99%, or 100% identical to SEQ ID NOs: 1967 and the VL comprises an amino acid sequence at least 70%, at least 80%, at least 90%, at least 95%, at least 96%, at least 97%, at least 98%, at least 99%, or 100% identical to SEQ ID NO: 1969;
[0623] (a10) the VH comprises an amino acid sequence at least 70%, at least 80%, at least 90%, at least 95%, at least 96%, at least 97%, at least 98%, at least 99%, or 100% identical to SEQ ID NOs: 1971 and the VL comprises an amino acid sequence at least 70%, at least 80%, at least 90%, at least 95%, at least 96%, at least 97%, at least 98%, at least 99%, or 100% identical to SEQ ID NO: 1973;
[0624] (a11) the VH comprises an amino acid sequence at least 70%, at least 80%, at least 90%, at least 95%, at least 96%, at least 97%, at least 98%, at least 99%, or 100% identical to SEQ ID NOs: 1975 and the VL comprises an amino acid sequence at least 70%, at least 80%, at least 90%, at least 95%, at least 96%, at least 97%, at least 98%, at least 99%, or 100% identical to SEQ ID NO: 1977;
[0625] (a12) the VH comprises an amino acid sequence at least 70%, at least 80%, at least 90%, at least 95%, at least 96%, at least 97%, at least 98%, at least 99%, or 100% identical to SEQ ID NOs: 1979 and the VL comprises an amino acid sequence at least 70%, at least 80%, at least 90%, at least 95%, at least 96%, at least 97%, at least 98%, at least 99%, or 100% identical to SEQ ID NO: 1981;
[0626] (a13) the VH comprises an amino acid sequence at least 70%, at least 80%, at least 90%, at least 95%, at least 96%, at least 97%, at least 98%, at least 99%, or 100% identical to SEQ ID NOs: 1983 and the VL comprises an amino acid sequence at least 70%, at least 80%, at least 90%, at least 95%, at least 96%, at least 97%, at least 98%, at least 99%, or 100% identical to SEQ ID NO: 1985;
[0627] (a14) the VH comprises an amino acid sequence at least 70%, at least 80%, at least 90%, at least 95%, at least 96%, at least 97%, at least 98%, at least 99%, or 100% identical to SEQ ID NOs: 1987 and the VL comprises an amino acid sequence at least 70%, at least 80%, at least 90%, at least 95%, at least 96%, at least 97%, at least 98%, at least 99%, or 100% identical to SEQ ID NO: 1989;
[0628] (a15) the VH comprises an amino acid sequence at least 70%, at least 80%, at least 90%, at least 95%, at least 96%, at least 97%, at least 98%, at least 99%, or 100% identical to SEQ ID NOs: 1991 and the VL comprises an amino acid sequence at least 70%, at least 80%, at least 90%, at least 95%, at least 96%, at least 97%, at least 98%, at least 99%, or 100% identical to SEQ ID NO: 1993;
[0629] (a16) the VH comprises an amino acid sequence at least 70%, at least 80%, at least 90%, at least 95%, at least 96%, at least 97%, at least 98%, at least 99%, or 100% identical to SEQ ID NOs: 1995 and the VL comprises an amino acid sequence at least 70%, at least 80%, at least 90%, at least 95%, at least 96%, at least 97%, at least 98%, at least 99%, or 100% identical to SEQ ID NO: 1997;
[0630] (a17) the VH comprises an amino acid sequence at least 70%, at least 80%, at least 90%, at least 95%, at least 96%, at least 97%, at least 98%, at least 99%, or 100% identical to SEQ ID NOs: 1999 and the VL comprises an amino acid sequence at least 70%, at least 80%, at least 90%, at least 95%, at least 96%, at least 97%, at least 98%, at least 99%, or 100% identical to SEQ ID NO: 2001;
[0631] (a18) the VH comprises an amino acid sequence at least 70%, at least 80%, at least 90%, at least 95%, at least 96%, at least 97%, at least 98%, at least 99%, or 100% identical to SEQ ID NOs: 2003 and the VL comprises an amino acid sequence at least 70%, at least 80%, at least 90%, at least 95%, at least 96%, at least 97%, at least 98%, at least 99%, or 100% identical to SEQ ID NO: 2005;
[0632] (a19) the VH comprises an amino acid sequence at least 70%, at least 80%, at least 90%, at least 95%, at least 96%, at least 97%, at least 98%, at least 99%, or 100% identical to SEQ ID NOs: 2007 and the VL comprises an amino acid sequence at least 70%, at least 80%, at least 90%, at least 95%, at least 96%, at least 97%, at least 98%, at least 99%, or 100% identical to SEQ ID NO: 2009;
[0633] (a20) the VH comprises an amino acid sequence at least 70%, at least 80%, at least 90%, at least 95%, at least 96%, at least 97%, at least 98%, at least 99%, or 100% identical to SEQ ID NOs: 2011 and the VL comprises an amino acid sequence at least 70%, at least 80%, at least 90%, at least 95%, at least 96%, at least 97%, at least 98%, at least 99%, or 100% identical to SEQ ID NO: 2013;
[0634] (a21) the VH comprises an amino acid sequence at least 70%, at least 80%, at least 90%, at least 95%, at least 96%, at least 97%, at least 98%, at least 99%, or 100% identical to SEQ ID NOs: 2015 and the VL comprises an amino acid sequence at least 70%, at least 80%, at least 90%, at least 95%, at least 96%, at least 97%, at least 98%, at least 99%, or 100% identical to SEQ ID NO: 2017;
[0635] (a22) the VH comprises an amino acid sequence at least 70%, at least 80%, at least 90%, at least 95%, at least 96%, at least 97%, at least 98%, at least 99%, or 100% identical to SEQ ID NOs: 2019 and the VL comprises an amino acid sequence at least 70%, at least 80%, at least 90%, at least 95%, at least 96%, at least 97%, at least 98%, at least 99%, or 100% identical to SEQ ID NO: 2021;
[0636] (a23) the VH comprises an amino acid sequence at least 70%, at least 80%, at least 90%, at least 95%, at least 96%, at least 97%, at least 98%, at least 99%, or 100% identical to SEQ ID NOs: 2023 and the VL comprises an amino acid sequence at least 70%, at least 80%, at least 90%, at least 95%, at least 96%, at least 97%, at least 98%, at least 99%, or 100% identical to SEQ ID NO: 2025;
[0637] (a24) the VH comprises an amino acid sequence at least 70%, at least 80%, at least 90%, at least 95%, at least 96%, at least 97%, at least 98%, at least 99%, or 100% identical to SEQ ID NOs: 2027 and the VL comprises an amino acid sequence at least 70%, at least 80%, at least 90%, at least 95%, at least 96%, at least 97%, at least 98%, at least 99%, or 100% identical to SEQ ID NO: 2029;
[0638] (a25) the VH comprises an amino acid sequence at least 70%, at least 80%, at least 90%, at least 95%, at least 96%, at least 97%, at least 98%, at least 99%, or 100% identical to SEQ ID NOs: 2031 and the VL comprises an amino acid sequence at least 70%, at least 80%, at least 90%, at least 95%, at least 96%, at least 97%, at least 98%, at least 99%, or 100% identical to SEQ ID NO: 2033; or,
[0639] (a26) the VH comprises an amino acid sequence at least 70%, at least 80%, at least 90%, at least 95%, at least 96%, at least 97%, at least 98%, at least 99%, or 100% identical to SEQ ID NOs: 2035 and the VL comprises an amino acid sequence at least 70%, at least 80%, at least 90%, at least 95%, at least 96%, at least 97%, at least 98%, at least 99%, or 100% identical to SEQ ID NO: 2037.

[0640] In some aspects, the anti-FIXa antibody, or antigen binding portion thereof, comprises a VH and a VL, wherein (a1) the VH and the VL comprise SEQ ID NOs: 1935 and 1937, respectively (BIIB-9-3595);
[0641] (a2) the VH and the VL comprise SEQ ID NOs: 1939 and 1941, respectively (BIIB-9-3601);
[0642] (a3) the VH and the VL comprise SEQ ID NOs: 1943 and 1945, respectively (BIIB-9-3604);
[0643] (a4) the VH and the VL comprise SEQ ID NOs: 1947 and 1949, respectively (BIIB-9-3617);
[0644] (a5) the VH and the VL comprise SEQ ID NOs: 1951 and 1953, respectively (BIIB-9-3618);
[0645] (a6) the VH and the VL comprise SEQ ID NOs: 1955 and 1957, respectively (BIIB-9-3621);
[0646] (a7) the VH and the VL comprise SEQ ID NOs: 1959 and 1961, respectively (BIIB-9-3647);
[0647] (a8) the VH and the VL comprise SEQ ID NOs: 1963 and 1965, respectively (BIIB-9-3649);
[0648] (a9) the VH and the VL comprise SEQ ID NOs: 1967 and 1969, respectively (BIIB-9-3650);
[0649] (a10) the VH and the VL comprise SEQ ID NOs: 1971 and 1973, respectively (BIIB-9-3654);
[0650] (a11) the VH and the VL comprise SEQ ID NOs: 1975 and 1977, respectively (BIIB-9-3753);
[0651] (a12) the VH and the VL comprise SEQ ID NOs: 1979 and 1981, respectively (BIIB-9-3754);
[0652] (a13) the VH and the VL comprise SEQ ID NOs: 1983 and 1985, respectively (BIIB-9-3756);
[0653] (a14) the VH and the VL comprise SEQ ID NOs: 1987 and 1989, respectively (BIIB-9-3764);
[0654] (a15) the VH and the VL comprise SEQ ID NOs: 1991 and 1993, respectively (BIIB-9-3766);
[0655] (a16) the VH and the VL comprise SEQ ID NOs: 1995 and 1997, respectively (BIIB-9-3707);
[0656] (a17) the VH and the VL comprise SEQ ID NOs: 1999 and 2001, respectively (BIIB-9-3709);
[0657] (a18) the VH and the VL comprise SEQ ID NOs: 2003 and 2005, respectively (BIIB-9-3720);
[0658] (a19) the VH and the VL comprise SEQ ID NOs: 2007 and 2009, respectively (BIIB-9-3727);
[0659] (a20) the VH and the VL comprise SEQ ID NOs: 2011 and 2013, respectively (BIIB-9-3745);
[0660] (a21) the VH and the VL comprise SEQ ID NOs: 2015 and 2017, respectively (BIIB-9-3780);
[0661] (a22) the VH and the VL comprise SEQ ID NOs: 2019 and 2021, respectively (BIIB-9-3675);
[0662] (a23) the VH and the VL comprise SEQ ID NOs: 2023 and 2025, respectively (BIIB-9-3681);
[0663] (a24) the VH and the VL comprise SEQ ID NOs: 2027 and 2029, respectively (BIIB-9-3684);
[0664] (a25) the VH and the VL comprise SEQ ID NOs: 2031 and 2033, respectively (BIIB-9-3698); or,
[0665] (a26) the VH and the VL comprise SEQ ID NOs: 2035 and 2037, respectively (BIIB-9-3704).

[0666] In some aspects, the binding of an anti-FIXa antibody disclosed herein (e.g., BIIB-9-484) to FIXa is calcium dependent. In other aspects, the binding of an anti-FIXa antibody disclosed herein to FIXa is calcium independent. In yet other aspects, the binding of the anti-FIXa antibody (e.g., BIIB-9-1336) to FIXa is partially calcium dependent.

[0667] In some aspects, an anti-FIXa antibody disclosed herein, e.g., BIIB-9-1336, can increase the amidolytic activity of FIXa. In some aspects, an anti-FIXa antibody disclosed herein (e.g., BIIB-9-1336, or a bispecific antibody comprising BIIB-9-1336) can increase the rate of substrate cleavage (e.g., ADG299) by FIXa. In some aspects, the binding of an anti-FIXa antibody disclosed herein, e.g., BIIB-9-1336, to FIXa can increase FIXa's amidolytic activity by at least 2-fold, at least 3-fold, or at least 4-fold. In some aspects, the binding of an anti-FIXa antibody disclosed herein, e.g., BIIB-9-1336, to FIXa can increase FIXa's amidolytic activity by at least 10%, at least 20%, at least 30%, at least 40%, at least 50%, at least 60%, at least 70%, at least 80%, at least 90%, at least 100%, at least 120%, at least 140%, at least 160%, at least 180%, at least 200%, at least 220%, at least 240%, at least 260%, at least 280%, at least 300%, at least 320%, at least 340%, at least 360%, at least 380%, at least 400%, at least 420%, at least 440%, at least 460%, at least 480%, or at least 500%.

[0668] The present disclosure provides a method to increase the amidolytic activity of FIXa comprising administering an anti-FIXa antibody disclosed here, e.g., BIIB-9-1336 or a bispecific antibody comprising BIIB-9-1336, to a subject in need thereof.

[0669] In some aspects, an anti-FIXa antibody disclosed herein can increase the rate of FIXa inhibition by anti-thrombin III (ATIII). In some aspects, an anti-FIXa antibody disclosed herein (e.g., BIIB-9-1336, or a bispecific antibody comprising BIIB-9-1336) can increase the rate of FIXa inhibition by ATIII. In some aspects, the rate of FIXa inhibition by ATIII is increased at least 2-fold, at least 3-fold, or at least 4-fold. In other aspects, binding of an anti-FIXa antibody disclosed herein, e.g., BIIB-9-1336, to FIXa can increase the rate of FIXa inhibition by ATIII by at least 10%, at least 20%, at least 30%, at least 40%, at least 50%, at least 60%, at least 70%, at least 80%, at least 90%, at least 100%, at least 120%, at least 140%, at least 160%, at least 180%, at least 200%, at least 220%, at least 240%, at least 260%, at least 280%, at least 300%, at least 320%, at least 340%, at least 360%, at least 380%, or at least 400%.

[0670] The present disclosure provides a method to increase rate of FIXa inhibition by ATIII comprising administering anti-FIXa antibody disclosed here, e.g., BIIB-9-1336 or a bispecific antibody comprising BIIB-9-1336, to a subject in need thereof.

### (b) Anti-FIXz Binding Molecules

[0671] The present disclosure therefore provides an antibody (e.g., an isolated antibody), or an antigen binding portion thereof, that specifically binds to FIX zymogen (FIXz), wherein the antibody or antigen binding portion thereof preferentially binds to FIXz in the presence of FIXa and FIXz (“anti-FIXz antibody or antigen binding portion thereof”).

[0672] In some aspects, the anti-FIXz antibody, or antigen binding portion thereof, binds to FIXz with a binding affinity higher than a binding affinity of the anti-FIXz antibody or antigen binding portion thereof to FIXa (e.g., free FIXa or FIXa-SM).

[0673] The present disclosure also provides an isolated anti-FIXz antibody, or antigen binding portion thereof, which binds to FIXz with a binding affinity higher than a binding affinity of the anti-FIXz antibody or antigen binding portion thereof to FIXa. In some aspects, the anti-FIXz antibody, or antigen binding portion thereof, binds to FIXz with a K_{D} of about 100 nM or less, about 95 nM or less, about 90 nM or less, about 85 nM or less, about 80 nM or less, about 75 nM or less, about 70 nM or less, about 65 nM or less, about 60 nM or less, about 55 nM or less, about 50 nM or less, about 45 nM or less, about 40 nM or less, about 35 nM or less, about 30 nM or less, about 25 nM or less, about 20 nM or less, about 15 nM or less, about 10 nM or less, about 5 nM or less, or about 1 nM or less as determined by a Bio-Layer Interferometry (BLI) assay. In other embodiments, the anti-FIXz antibody, or antigen binding portion thereof, binds to FIXz with a K_{D} of about 10 nM or less, about 9 nM or less, about 8 nM or less, about 7 nM or less, about 6 nM or less, about 5 nM or less, about 4 nM or less, about 3 nM or less, about 2 nM or less, about 1 nM or less, about 0.5 nM or less, about 0.2 nM or less, about 0.1 nM or less, or about 0.05 nM or less.

[0674] In some aspects, the anti-FIXz antibody, or antigen binding portion thereof, cross-competes with a reference antibody selected from the group consisting of the antibodies in FIG. 3D. In some aspects, the anti-FIXa antibody, or antigen binding portion thereof, binds to the same epitope as a reference antibody selected from the group consisting of the antibodies in FIG. 3D. In some aspects, the reference antibody is BIIB-9-578.

[0675] In further aspects, the anti-FIXz antibody or antigen binding portion thereof can be also referred to as Class IV: anti-FIXz antibodies or antigen binding portion thereof that preferentially binds to FIXz over free FIXa or FIXa-SM (FIG. 3D antibodies).

[0676] In some aspects, the anti-FIXz antibody, or antigen binding portion thereof, comprises a VH CDR1, a VH CDR2, and a VH CDR3, wherein the VH CDR3 comprises
[0677] (i) a VH CDR3 sequence identical to a VH CDR3 sequence selected from the group consisting of VH CDR3 sequences in FIG. 3D, or
[0678] (ii) a VH CDR3 sequence identical to a VH CDR3 sequence selected from the group consisting of VH CDR3 sequences in FIG. 3D except for 1, 2, or 3 amino acid substitutions.

[0679] In some aspects, the amino acid substitutions are conservative amino acid substitutions. In other aspects, the amino acid substitutions are back mutation.

[0680] In some aspects, the anti-FIXz antibody, or antigen binding portion thereof, comprises a VH CDR1, a VH CDR2, and a VH CDR3, wherein the VH CDR3 sequence comprises an amino acid sequence selected from ARDKYQDYSFDI (SEQ ID NO: 1355; BIIB-9-578). In some aspects, the VH CDR3 sequences disclosed herein can comprise 1, 2, or 3 amino acid substitutions.

[0681] In some aspects, the anti-FIXz antibody, or antigen binding portion thereof, comprises a VH CDR1, a VH CDR2, and VH CDR3, wherein the VH CDR3 comprises SEQ ID NO: 1355 (BIIB-9-578) and the VH CDR1 sequence comprises
[0682] (i) a VH CDR1 sequence identical to a sequence selected from the group consisting of the VH CDR1 sequences disclosed in FIG. 3D, or
[0683] (ii) a VH CDR1 sequence identical to a sequence selected from the group consisting of the VH CDR1 sequences disclosed in FIG. 3D except for 1, 2, or 3 amino acid substitutions.

[0684] In some aspects, the anti-FIXz antibody, or antigen binding portion thereof, comprises a VH CDR1, a VH CDR2, and VH CDR3, wherein the VH CDR3 comprises SEQ ID NO: 1355 (BIIB-9-578) and the VH CDR2 sequence comprises
[0685] (i) a VH CDR2 sequence identical to a sequence selected from the group consisting of the VH CDR2 sequences disclosed in FIG. 3D, or
[0686] (ii) a VH CDR2 sequence identical to a sequence selected from the group consisting of the VH CDR2 sequences disclosed in FIG. 3D except for 1, 2, or 3 amino acid substitutions.

[0687] In some aspects, the anti-FIXz antibody, or antigen binding portion thereof, further comprises a VL CDR1, a VL CDR2, and a VL CDR3, wherein the VL CDR1 sequence comprises
[0688] (i) a VL CDR1 sequence identical to a sequence selected from the group consisting of the VL CDR1 sequences disclosed in FIG. 3D, or
[0689] (ii) a VL CDR1 sequence identical to a sequence selected from the group consisting of the VL CDR1 sequences disclosed in FIG. 3D except for 1, 2, or 3 amino acid substitutions.

[0690] In some aspects, the anti-FIXz antibody, or antigen binding portion thereof, further comprises a VL CDR1, a VL CDR2, and a VL CDR3, wherein the VL CDR2 sequence comprises
[0691] (i) a VL CDR2 sequence identical to a sequence selected from the group consisting of the VL CDR2 sequences in FIG. 3D, or
[0692] (ii) a VL CDR2 sequence identical to a sequence selected from the group consisting of the VL CDR2 sequences in FIG. 3D except for 1, 2, or 3 amino acid substitutions.

[0693] In some aspects, the anti-FIXa antibody, or antigen binding portion thereof, further comprises a VL CDR1, a VL CDR2, and a VL CDR3, wherein the VL CDR3 sequence comprises
[0694] (i) a VL CDR3 sequence identical to a sequence selected from the group consisting of the VL CDR3 sequences disclosed in FIG. 3D, or
[0695] (ii) a VL CDR3 sequence identical to a sequence selected from the group consisting of the VL CDR3 sequences disclosed in FIG. 3D except for 1, 2, or 3 amino acid substitutions.

[0696] The present disclosure also provides an isolated antibody, or antigen binding portion thereof, which preferentially binds to FIXz, comprising a VH CDR1, a VH CDR2, and a VH CDR3, and a VL CDR1, a VL CDR2, and a VL CDR3, wherein the VH CDR1, VH CDR2, and VH CDR3 and the VL CDR1, VL CDR2, and VL CDR3 comprise the VH CDR1, VH CDR2, and VH CDR3 and the VL CDR1, VL CDR2, and VL CDR3 of an anti-FIXz antibody selected from the group consisting of the antibodies in FIG. 3D: BIIB-9-397, BIIB-9-578, BIIB-9-631, and BIIB-9-612.

[0697] In some aspects, the anti-FIXz antibody, or antigen binding portion thereof, comprises VH CDR1, VH CDR2, and VH CDR3 sequences comprising SEQ ID NOs: 1346-1349, SEQ ID NOs: 1350-1353, and SEQ ID NOs: 1354-1357, respectively (VH CDRs for Class IV antibodies), and/or VL CDR1, VL CDR2, and VL CDR3 sequences comprising SEQ ID NOs: 1358-1361, SEQ ID NOs: 1362-1365, and SEQ ID NO: 1366-1369, respectively (VL CDRs for Class IV antibodies).

[0698] In some aspects, the anti-FIXz antibody, or antigen binding portion thereof, comprises VH CDR1, VH CDR2, and VH CDR3 sequences comprising SEQ ID NO: 1347, SEQ ID NO: 1351, and SEQ ID NO: 1355, respectively (VH CDRs for BIIB-9-578 antibodies), and/or VL CDR1, VL CDR2, and VL CDR3 sequences comprising SEQ ID NO: 1359, SEQ ID NO: 1363, and SEQ ID NO: 1367, respectively (VL CDRs for BIIB-9-578 antibodies).

[0699] In some aspects, the anti-FIXz antibody, or antigen binding portion thereof, comprises a VH, wherein the VH comprises an amino acid sequence which is at least about 70%, at least about 75%, at least about 80%, at least about 85%, at least about 90%, at least about 95%, at least about 96%, at least about 97%, at least about 98%, at least about 99%, or about 100% identical to an amino acid sequence selected from the group consisting of SEQ ID NOs: 183, 185, 187, and 189.

[0700] In some aspects, the anti-FIXz antibody, or antigen binding portion thereof, comprises a VL, wherein the VL comprises an amino acid sequence which is at least about 70%, at least about 75%, at least about 80%, at least about 85%, at least about 90%, at least about 95%, at least about 96%, at least about 97%, at least about 98%, at least about 99%, or about 100% identical an the amino acid sequence selected from the group consisting of SEQ ID NOs: 369, 371, 373, and 375.

[0701] In some aspects, the anti-FIXz antibody, or antigen binding portion thereof, comprises a VH and a VL, wherein
[0702] (i) the VH comprises an amino acid sequence which is at least about 70%, at least about 75%, at least about 80%, at least about 85%, at least about 90%, at least about 95%, at least about 96%, at least about 97%, at least about 98%, at least about 99%, or about 100% identical to an amino acid sequence selected from the group consisting of SEQ ID NOs: 183, 185, 187, and 189; and,
[0703] (ii) the VL comprises an amino acid sequence which is at least about 70%, at least about 75%, at least about 80%, at least about 85%, at least about 90%, at least about 95%, at least about 96%, at least about 97%, at least about 98%, at least about 99%, or about 100% identical to an amino acid sequence selected from the group consisting of SEQ ID NOs: 369, 371, 373, and 375.

[0704] In certain embodiments, an anti-FIXz antibody comprises a heavy chain variable region from a particular germline heavy chain immunoglobulin gene and/or a light chain variable region from a particular germline light chain immunoglobulin gene. In some embodiments, the VH sequence of the anti-FIXz antibody can be derived from any one of V, D, or J germline sequences and/or the VL sequence of the anti-FIXz antibody can be derived from any one of kappa or lambda germline sequence.

[0705] As demonstrated herein, human antibodies specific for FIXz have been prepared that comprise a heavy chain variable region that is the product of or derived from a human germline gene. Accordingly, provided herein are isolated FIXz antibodies, or antigen-binding portions thereof, comprising a heavy chain variable region that is the product of or derived from a human VH germline gene selected from the group consisting of: VH1-18, VH1-46, VH3-21, VH3-30, VH4-31, VH4-39, VH4-0B, VH5-51, and any combination thereof. In particular embodiments, the VH germline gene is selected from the group consisting of VH1-18.0, VH1-18.1, VH1-18.8, VH1-46.0, VH1-46.4, VH1-46.5, VH1-46.6, VH1-46.7, VH1-46.8, VH1-46.9, VH3-21.0, VH3-23.0, VH3-23.2, VH3-23.6, VH3-30.0, VH4-31.5, VH4-39.0, VH4-39.5. VH4-0B.4, VH5-51.1, and any combination thereof.

[0706] In other embodiments, provided herein are isolated FIXa antibodies, or antigen-binding portions thereof, comprising a heavy chain variable region that is the product of or derived from a human VL germline gene selected from the group consisting of: VK1-05, VK1-12, VK1-39, VK2-28, VK3-11, VK3-15, VK3-20, VK4-01, and any combination thereof. In particular embodiments, the VL germline gene is selected from the group consisting of VK1-05.6, VK1-05.12, VK1-12.0, VK1-12.4, VK1-12.7, VK1-12.10, VK1-12.15, VK1-39.0, VK1-39.3, VK1-39.15, VK2-28.0, VK2-28.1, VK2-28.5, VK3-11.0, VK3-11.2, VK3-11.6, VK3-11.14, VK3-15.0, VK3-15.8, VK3-15.10, VK3-20.0, VK3-20.1, VK3-20.4, VK3-20.5, VK4-01.0, VK4-01.4, VK4-01.20, and any combination thereof.

[0707] In some aspects, the anti-FIXz antibody, or antigen binding portion thereof, comprises a VH and a VL, wherein the VH comprises an amino acid sequence at least 70%, at least 80%, at least 90%, at least 95%, at least 96%, at least 97%, at least 98%, at least 99%, or 100% identical to SEQ ID NO: 185 and VL comprises an amino acid sequence at least 70%, at least 80%, at least 90%, at least 95%, at least 96%, at least 97%, at least 98%, at least 99%, or 100% identical to SEQ ID NO: 371 (VH and VL of BIIB-9-578 antibody, respectively).

### (c) Anti-FXz Binding Molecules

[0708] The present disclosure also provides anti-FX binding molecules, e.g., anti-FX antibodies or molecules comprising FX-binding fragments thereof, that specifically bind FX. In some aspects of the present disclosure the disclosed anti-FX binding molecules, e.g., anti-FX antibodies or molecules comprising FX-binding fragments thereof, preferentially bind FX zymogen (FXz) (referred to throughout the present disclosure as “anti-FXz antibody”).

[0709] Factor X is a vitamin-K dependent glycoprotein with a molecular weight of 58.5 kDa, which is secreted from liver cells into the plasma as a zymogen. Initially factor X is produced as a prepropeptide with a signal peptide consisting in total of 488 amino acids. The amino acid sequence of FX zymogen (FXz) is provided below (the signal sequence (1-23) is underlined and the propeptide (24-40) is boldened):

(SEQ ID NO: 765)
MGRPLHLVLLSASLAGLLLLGESLFIRREQANNIL
ARVTRANSFLEEMKKGHLERECMEETCSYEEAREV
FEDSDKTNEFWNKYKDGDQCETSPCQNQGKCKDGL
GEYTCTCLEGFEGKNCELFTRKLCSLDNGDCDQFC
HEEQNSVVCSCARGYTLADNGKACIPTGPYPCGKQ
TLERRKRSVAQATSSSGEAPDSITWKPYDAADLDP
TENPFDLLDFNQTQPERGDNNLTRIVGGQECKDGE
CPWQALLINEENEGFCGGTILSEFYILTAAHCLYQ
AKRFKVRVGDRNTEQEEGGEAVHEVEVVIKHNRFT
KETYDFDIAVLRLKTPITFRMNVAPACLPERDWAE
STLMTQKTGIVSGFGRTHEKGRQSTRLKMLEVPYV
DRNSCKLSSSFIITQNMFCAGYDTKQEDACQGDSG
GPHVTRFKDTYFVTGIVSWGEGCARKGKYGIYTKV
TAFLKWIDRSMKTRGLPKAKSHAPEVITSSPLK

[0710] The signal peptide is cleaved off by signal peptidase during export into the endoplasmic reticulum. The propeptide sequence is cleaved off after gamma carboxylation took place at the first 11 glutamic acid residues at the N-terminus of the mature N-terminal chain. A further processing step occurs by cleavage between Arg182 and Ser183. This processing step also leads concomitantly to the deletion of the tripeptide Arg180-Lys181-Arg182. The resulting secreted factor X zymogen consists of an N-terminal light chain of 139 amino acids (M, 16,200) (i.e., amino acids 41 to 179 of SEQ ID NO: 765) and a C-terminal heavy chain of 306 amino acids (M, 42,000) (i.e., amino acids 183 to 488 of SEQ ID NO: 765), which are covalently linked via a disulfide bridge between Cys172 and Cys342. Further posttranslational processing steps include the β-hydroxylation of Asp103 as well as N- and O-type glycosylation.

[0711] FX zymogen can be cleaved in its heavy chain between Arg234 and Ile235 (corresponding to SEQ ID NO: 765) by factor IXa and consequently become activated after the release of an activation peptide.

[0712] The term “FX zymogen” can be used interchangeably herein with “FXz,” “FX precursor,” “unactivated FX,” “non-activated FX,” or “non-activated FX precursor.” In one embodiment, FX zymogen (FIXz) includes non-activated FX precursor in which the activation peptide (e.g., 52 amino acids activation peptide that are represented as amino acids 183 to 234 of SEQ ID NO: 765 (mature numbering) is not cleaved from the precursor. FIX zymogen can include any naturally-occurring or engineered variants. A non-limiting example of FX zymogen is shown in SEQ ID NO: 765. In another embodiment, FX zymogen is non-activatable FX (FXn), which is engineered to be non-active in the presence of Factor FIXa. An example of non-activatable FX can be FX carrying an arginine to alanine mutation at position 194 (mature numbering) preventing its activation and maintaining Factor X in the zymogen form (FXz). FX zymogen can optionally contain a signal peptide and/or propeptide.

[0713] The term “activated FX” can be used interchangeably herein with “FXa”. In one embodiment, activated FX is wild-type, naturally occurring FXa (also referred to herein as “wild-type FXa”). In another embodiment, FXa comprises non-naturally occurring FXa, e.g., FXa conformational variant. For example, FXa can be a FXa-SM, which is designed to have a conformation similar to the substrate bound FXa. In a particular embodiment, FXa-SM is activated FX with a substrate mimic covalently bound to the active site.

[0714] The present disclosure provides an antibody (e.g., an isolated antibody), or an antigen binding portion thereof, that specifically binds to FXz, wherein the anti-FX antibody or antigen binding portion thereof preferentially binds to FXz in the presence of FXz and FXa. In one embodiment, the FXa is FXa covalently attached to a substrate mimic (i.e., Glu-Gly-Arg-chloromethyl ketone (EGR-CMK)).

[0715] In some aspects, the anti-FXz antibody, or antigen binding portion thereof, binds to FXz with a binding affinity higher than a binding affinity of the antibody or antigen binding portion thereof to FXa. The present disclosure also provides an isolated anti-FX antibody, or antigen binding portion thereof, which binds to FXz with a binding affinity higher than a binding affinity of the antibody or antigen binding portion thereof to FXa.

[0716] In some aspects, the anti-FXz antibody, or antigen binding portion thereof, binds to FXz with a K_{D} of about 100 nM or less, about 95 nM or less, about 90 nM or less, about 85 nM or less, about 80 nM or less, about 75 nM or less, about 70 nM or less, about 65 nM or less, about 60 nM or less, about 55 nM or less, about 50 nM or less, about 45 nM or less, about 40 nM or less, about 35 nM or less, about 30 nM or less, about 25 nM or less, about 20 nM or less, about 15 nM or less, about 10 nM or less, about 5 nM or less, or about 1 nM or less as determined by a BLI assay.

[0717] In other embodiments, the anti-FXz antibody, or antigen binding portion thereof, binds to FXz with a K_{D} of about 10 nM or less, about 9 nM or less, about 8 nM or less, about 7 nM or less, about 6 nM or less, about 5 nM or less, about 4 nM or less, about 3 nM or less, about 2 nM or less, about 1 nM or less, about 0.5 nM or less, about 0.2 nM or less, about 0.1 nM or less, or about 0.05 nM or less. In yet other embodiments, the anti-FXz antibody, or antigen binding portion thereof, binds to FXz with a K_{D} of 1 nM to 100 nM, 1 nM to 90 nM, 1 nM to 80 nM, 1 nM to 70 nM, 1 nM to 60 nM, 1 nM to 50 nM, 1 nM to 40 nM, 1 nM to 30 nM, 1 nM to 20 nM, 1 nM to 10 nM, 0.1 nM to 100 nM, 0.1 nM to 90 nM, 0.1 nM to 80 nM, 0.1 nM to 70 nM, 0.1 nM to 60 nM, 0.1 nM to 50 nM, 0.1 nM to 40 nM, 0.1 nM to 30 nM, 0.1 nM to 20 nM, 0.1 nM to 10 nM, or 0.1 nM to 1 nM.

[0718] In some aspects, the anti-FXz antibody or an antigen binding portion thereof, cross-competes with a reference antibody selected from the group consisting of the antibodies in FIG. 12A and FIG. 12B. In some aspects, the anti-FXz antibody or antigen binding portion thereof, binds to the same epitope as a reference antibody selected from the group consisting of the antibodies in FIG. 12A and FIG. 12B. In some aspects, the anti-FXz or an antigen binding portion thereof, binds to the same epitope as a reference antibody selected from the group consisting of BIIB-12-915, BIIB-12-917, BIIB-12-932, and any combination thereof.

[0719] In some aspects, the anti-FXz antibody or an antigen binding portion thereof, binds to an antigen binding site (e.g., an epitope) that is substantially the same as the antigen binding site of any anti-FXz antibody or antigen binding portion thereof disclosed herein. In some aspects, the anti-FXz antibody or antigen binding portion thereof, binds to an antigen binding site (e.g., an epitope) that overlaps with the antigen binding site (e.g., epitope) of an anti-FXz antibody or antigen binding portion thereof disclosed herein.

[0720] In some aspects, the anti-FXz antibody or antigen binding portion thereof, comprises a VH CDR1, a VH CDR2, and a VH CDR3, wherein the VH CDR3 sequence comprises a
[0721] (i) a VH CDR3 sequence identical to a VH CDR3 sequence selected from the group consisting of VH CDR3 sequences in FIG. 12A or FIG. 12B; or,
[0722] (ii) a VH CDR3 sequence identical to a VH CDR3 sequence selected from the group consisting of VH CDR3 sequences in FIG. 12A or FIG. 12B except for 1, 2, or 3 amino acid substitutions.

[0723] In some aspects, the amino acid substitutions are conservative amino acid substitutions or back mutations

[0724] In some aspects, the anti-FXz antibody or antigen binding portion thereof, comprises VH CDR1, a VH CDR2, and a VH CDR3, wherein the VH CDR3 sequence comprises the amino acid sequence ARX₁X₂X₃RX₄X₅X₆X₇FDX₈ (SEQ ID NO: 766), wherein X₁ is G or L, X₂ is R or G, X₃ is F or Y, X₄ is P or G, X₅ is R or A, X₆ is G or S, X₇ is R or A, and X₈ is Y or I.

[0725] In some aspects, the anti-FXz antibody or antigen binding portion thereof, comprises VH CDR1, a VH CDR2, and a VH CDR3, wherein the VH CDR3 sequence consists or consists essentially of the amino acid sequence ARX₁X₂X₃RX₄X₅X₆X₇FDX₈ (SEQ ID NO: 766), wherein X₁ is G or L, X₂ is R or G, X₃ is F or Y, X₄ is P or G, X₅ is R or A, X₆ is G or S, X₇ is R or A, and X₈ is Y or I.

[0726] In some aspects, the anti-FXz antibody or antigen binding portion thereof, comprises a VH CDR1, a VH CDR2, and a VH CDR3, wherein the VH CDR3 sequence comprises an amino acid sequence selected from ARGRFRPRGRFDY (SEQ ID NO: 1575, BIIB-12-917), ARLGYRGASAFDI (SEQ ID NO: 1589, BIIB-12-932), or ARVGGGYANP (SEQ ID NO: 1573, BIIB-12-915).

[0727] In some aspects, the anti-FXz antibody, or antigen binding portion thereof, comprises a VH CDR1, a VH CDR2, and VH CDR3, wherein the VH CDR1 sequence comprises
[0728] (i) a VH CDR1 sequence identical to a sequence selected from the group consisting of the VH CDR1 sequences disclosed in FIG. 12A or FIG. 12B, or
[0729] (ii) a VH CDR1 sequence identical to a sequence selected from the group consisting of the VH CDR1 sequences disclosed in FIG. 12A or FIG. 12B except for 1, 2, or 3 amino acid substitutions.

[0730] In some aspects, the anti-FXz antibody, or antigen binding portion thereof, comprises a VH CDR1, a VH CDR2, and a VH CDR3, wherein the VH CDR2 sequence comprises
[0731] (i) a VH CDR2 sequence identical to a sequence selected from the group consisting of the VH CDR2 sequences disclosed in FIG. 12A or FIG. 12B, or
[0732] (ii) a VH CDR2 sequence identical to a sequence selected from the group consisting of the VH CDR2 sequences disclosed in FIG. 12A or FIG. 12B except for 1, 2, or 3 amino acid substitutions.

[0733] In some aspects, the anti-FXz antibody or antigen binding portion thereof, comprises a VL CDR1, a VL CDR2, and a VL CDR3, wherein the VL CDR1 sequence comprises
[0734] (i) a VL CDR1 sequence identical to a sequence selected from the group consisting of the VL CDR1 sequences disclosed in FIG. 12A or FIG. 12B, or
[0735] (ii) a VL CDR1 sequence identical to a sequence selected from the group consisting of the VL CDR1 sequences disclosed in FIG. 12A or FIG. 12B except for 1, 2, or 3 amino acid substitutions.

[0736] In some aspects, the anti-FXz antibody or antigen binding portion thereof, comprises a VL CDR1, a VL CDR2, and a VL CDR3, wherein the VL CDR2 sequence comprises
[0737] (i) a VL CDR2 sequence identical to a sequence selected from the group consisting of the VL CDR2 sequences in FIG. 12A or FIG. 12B, or
[0738] (ii) a VL CDR2 sequence identical to a sequence selected from the group consisting of the VL CDR2 sequences in FIG. 12A or FIG. 12B except for 1, 2, or 3 amino acid substitutions.

[0739] In some aspects, the anti-FXz antibody or antigen binding portion thereof, comprises a VL CDR1, a VL CDR2, and a VL CDR3, wherein the VL CDR3 sequence comprises
[0740] (i) a VL CDR3 sequence identical to a sequence selected from the group consisting of the VL CDR3 sequences disclosed in FIG. 12A or FIG. 12B, or
[0741] (ii) a VL CDR3 sequence identical to a sequence selected from the group consisting of the VL CDR3 sequences disclosed in FIG. 12A or FIG. 12B except for 1, 2, or 3 amino acid substitutions.

[0742] In some aspects, the anti-FXz antibody or antigen binding portion thereof, comprises a VL CDR1, a VL CDR2, and a VL CDR3, wherein the VL CDR3 sequence consists or consists essentially of
[0743] (i) a VL CDR3 sequence identical to a sequence selected from the group consisting of the VL CDR3 sequences disclosed in FIG. 12A or FIG. 12B, or
[0744] (ii) a VL CDR3 sequence identical to a sequence selected from the group consisting of the VL CDR3 sequences disclosed in FIG. 12A or FIG. 12B except for 1, 2, or 3 amino acid substitutions.

[0745] The present disclosure also provides an isolated antibody, or antigen binding portion thereof, which specifically binds to FXz, comprising a VH CDR1, a VH CDR2, and a VH CDR3 and a VL CDR1, a VL CDR2, and a VL CDR3, wherein the VH CDR1, VH CDR2, and VH CDR3 and the VL CDR1, VL CDR2, and VL CDR3 comprise the VH CDR1, VH CDR2, and VH CDR3 and the VL CDR1, VL CDR2, and VL CDR3 of an anti-FXz antibody selected from the group consisting of BIIB-12-891, BIIB-12-892, BIIB-12-893, BIIB-12-895, BIIB-12-896, BIIB-12-897, BIIB-12-898, BIIB-12-899, BIIB-12-900, BIIB-12-901, BIIB-12-902, BIIB-12-903, BIIB-12-904, BIIB-12-905, BIIB-12-906, BIIB-12-907, BIIB-12-908, BIIB-12-909, BIIB-12-910, BIIB-12-911, BIIB-12-912, BIIB-12-913, BIIB-12-914, BIIB-12-915, BIIB-12-916, BIIB-12-917, BIIB-12-918, BIIB-12-919, BIIB-12-920, BIIB-12-921, BIIB-12-922, BIIB-12-923, BIIB-12-924, BIIB-12-926, BIIB-12-927, BIIB-12-928, BIIB-12-929, BIIB-12-930, BIIB-12-931, BIIB-12-932, BIIB-12-933, BIIB-12-934, BIIB-12-935, BIIB-12-936, BIIB-12-937, BIIB-12-1288, BIIB-12-1289, BIIB-12-1290, BIIB-12-1291, BIIB-12-1292, BIIB-12-1293, BIIB-12-1294, BIIB-12-1295, BIIB-12-1296, BIIB-12-1297, BIIB-12-1298, BIIB-12-1299, BIIB-12-1300, BIIB-12-1301, BIIB-12-1302, BIIB-12-1303, BIIB-12-1304, BIIB-12-1305, BIIB-12-1306, BIIB-12-1307, BIIB-12-1308, BIIB-12-1309, BIIB-12-1310, BIIB-12-1311, BIIB-12-1312, BIIB-12-1313, BIIB-12-1314, BIIB-12-1315, BIIB-12-1316, BIIB-12-1317, BIIB-12-1318, BIIB-12-1319, BIIB-12-1322, BIIB-12-1323, BIIB-12-1324, BIIB-12-1325, BIIB-12-1326, BIIB-12-1327, BIIB-12-1328, BIIB-12-1329, BIIB-12-1330, BIIB-12-1331, BIIB-12-1332, BIIB-12-1333, or BIIB-12-1334.

[0746] In some aspects, the anti-FXz antibody, or antigen binding portion thereof, comprises VH CDR1, VH CDR2, and VH CDR3 sequences comprising SEQ ID NO: 1393, SEQ ID NO: 1483, and SEQ ID NO: 1573, respectively (VH CDRs of BIIB-12-915 antibody), and/or VL CDR1, VL CDR2, and VL CDR3 sequences comprising SEQ ID NO: 1663, SEQ ID NO: 1753, and SEQ ID NO: 1843, respectively (VL CDRs of BIIB-12-915 antibody).

[0747] In some aspects, the anti-FXz antibody, or antigen binding portion thereof, comprises VH CDR1, VH CDR2, and VH CDR3 sequences comprising SEQ ID NO: 1395, SEQ ID NO: 1485, and SEQ ID NO: 1575, respectively (VH CDRs of BIIB-12-917 antibody), and/or VL CDR1, VL CDR2, and VL CDR3 sequences comprising SEQ ID NO: 1665, SEQ ID NO: 1755, and SEQ ID NO: 1845, respectively (VL CDRs of BIIB-12-917 antibody).

[0748] In some aspects, the anti-FXz antibody, or antigen binding portion thereof, comprises VH CDR1, VH CDR2, and VH CDR3 sequences comprising SEQ ID NO: 1409, SEQ ID NO: 1499, and SEQ ID NO: 1589, respectively (VH CDRs of BIIB-12-932 antibody), and/or VL CDR1, VL CDR2, and VL CDR3 sequences comprising SEQ ID NO: 1679, SEQ ID NO: 1769, and SEQ ID NO: 1859, respectively (VL CDRs of BIIB-12-932 antibody).

[0749] In some aspects, the anti-FXz antibody or antigen binding portion thereof, comprises a VH and a VL, wherein the VH comprises an amino acid sequence which is at least about 70%, at least about 75%, at least about 80%, at least about 85%, at least about 90%, at least about 95%, at least about 96%, at least about 97%, at least about 98%, at least about 99%, or about 100% identical to the amino acid sequence selected from the group consisting of SEQ ID NOs: 377, 379, 381, 383, 385, 387, 389, 391, 393, 395, 397, 399, 401, 403, 405, 407, 409, 411, 413, 415, 417, 419, 421, 423, 425, 427, 429, 431, 433, 435, 437, 439, 441, 443, 445, 447, 449, 451, 453, 455, 457, 459, 461, 463, 465, 467, 469, 471, 473, 475, 477, 479, 481, 483, 485, 487, 489, 491, 493, 495, 497, 499, 501, 503, 505, 507, 509, 511, 513, 515, 517, 519, 521, 523, 525, 527, 529, 531, 533, 535, 537, 539, 541, 543, 545, 547, 549, 551, 553, and 555.

[0750] In some aspects, the anti-FXz antibody or antigen binding portion thereof, comprises a VH and a VL, wherein the VL comprises an amino acid sequence which is at least about 70%, at least about 75%, at least about 80%, at least about 85%, at least about 90%, at least about 95%, at least about 96%, at least about 97%, at least about 98%, at least about 99%, or about 100% identical to the amino acid sequence selected from the group consisting of SEQ ID NOs: 565, 567, 569, 571, 573, 575, 579, 581, 583, 585, 587, 589, 591, 593, 595, 597, 599, 601, 603, 605, 607, 609, 611, 613, 615, 617, 619, 621, 623, 625, 627, 629, 631, 633, 635, 637, 639, 641, 643, 645, 647, 649, 651, 653, 655, 657, 659, 661, 663, 665, 667, 669, 671, 673, 675, 677, 679, 681, 683, 685, 687, 689, 691, 693, 695, 697, 699, 701, 703, 705, 707, 709, 711, 713, 715, 717, 719, 721, 723, 725, 727, 729, 731, 733, 735, 737, 739, 741, and 743.

[0751] In some aspects, the anti-FXz antibody or antigen binding portion thereof, comprises a VH and a VL, wherein

(i) the VH comprises an amino acid sequence which is at least about 70%, at least about 75%, at least about 80%, at least about 85%, at least about 90%, at least about 95%, at least about 96%, at least about 97%, at least about 98%, at least about 99%, or about 100% identical to the amino acid sequence selected from the group consisting of SEQ ID NOs: 377, 379, 381, 383, 385, 387, 389, 391, 393, 395, 397, 399, 401, 403, 405, 407, 409, 411, 413, 415, 417, 419, 421, 423, 425, 427, 429, 431, 433, 435, 437, 439, 441, 443, 445, 447, 449, 451, 453, 455, 457, 459, 461, 463, 465, 467, 469, 471, 473, 475, 477, 479, 481, 483, 485, 487, 489, 491, 493, 495, 497, 499, 501, 503, 505, 507, 509, 511, 513, 515, 517, 519, 521, 523, 525, 527, 529, 531, 533, 535, 537, 539, 541, 543, 545, 547, 549, 551, 553, and 555; and
(ii) the VL comprises an amino acid sequence which is at least about 70%, at least about 75%, at least about 80%, at least about 85%, at least about 90%, at least about 95%, at least about 96%, at least about 97%, at least about 98%, at least about 99%, or about 100% identical to the amino acid sequence selected from the group consisting of 565, 567, 569, 571, 573, 575, 579, 581, 583, 585, 587, 589, 591, 593, 595, 597, 599, 601, 603, 605, 607, 609, 611, 613, 615, 617, 619, 621, 623, 625, 627, 629, 631, 633, 635, 637, 639, 641, 643, 645, 647, 649, 651, 653, 655, 657, 659, 661, 663, 665, 667, 669, 671, 673, 675, 677, 679, 681, 683, 685, 687, 689, 691, 693, 695, 697, 699, 701, 703, 705, 707, 709, 711, 713, 715, 717, 719, 721, 723, 725, 727, 729, 731, 733, 735, 737, 739, 741, and 743.

[0752] In certain embodiments, an anti-FIXa antibody comprises a heavy chain variable region from a particular germline heavy chain immunoglobulin gene and/or a light chain variable region from a particular germline light chain immunoglobulin gene. In some embodiments, the VH sequence of the anti-FIXa antibody can be derived from any one of V, D, or J germline sequences and/or the VL sequence of the anti-FIXa antibody can be derived from any one of kappa or lambda germline sequence.

[0753] As demonstrated herein, human antibodies specific for FIXa have been prepared that comprise a heavy chain variable region that is the product of or derived from a human germline gene. Accordingly, provided is an anti-FXz antibody or antigen binding portion thereof, comprising a VH and a VL, wherein the VH is derived from a germline sequence of VH1-18, VH1-46, VH3-21, VH3-23, VH3-30, VH4-31, VH4-39, VH4-0B, or VH5-51. In some aspects, the anti-FXz antibody or antigen binding portion thereof, comprises a VH and a VL, wherein the VL is derived from a germline sequence of VK1-05, VK1-12, VK1-39, VK2-28, VK3-11, VK3-15, VK3-20, or VK4-01. In some aspects, the anti-FXz antibody or antigen binding portion thereof, comprises a VH and a VL, wherein the VH is derived from a germline sequence of VH1-18.0, VH1-18.1, VH1-18.8, VH1-46.0, VH1-46.4, VH1-46.5, VH1-46.6, VH1-46.7, VH1-46.8, VH1-46.9, VH3-21.0, VH3-23.0, VH3-23.2, VH3-23.6, VH3-30.0, VH4-31.5, VH4-39.0, VH4-39.5. VH4-0B.4, or VH5-51.1, and the VL is derived from a germline sequence of VK1-05.6, VK1-05.12, VK1-12.0, VK1-12.4, VK1-12.7, VK1-12.10, VK1-12.15, VK1-39.0, VK1-39.3, VK1-39.15, VK2-28.0, VK2-28.1, VK2-28.5, VK3-11.0, VK3-11.2, VK3-11.6, VK3-11.14, VK3-15.0, VK3-15.8, VK3-15.10, VK3-20.0, VK3-20.1, VK3-20.4, VK3-20.5, VK4-01.0, VK4-01.4, VK4-01.20. In some aspects, the VH and/or the VL are derived from their respective germlines via affinity optimization

[0754] Antibodies described herein include those comprising a heavy chain variable region that is the product of or derived from one of the above-listed human germline VH genes and also comprising a light chain variable region that is the product of or derived from one of the above-listed human germline VK genes, as shown in the Figures.

[0755] As used herein, a human antibody comprises heavy and light chain variable regions that are “the product of or “derived from” a particular germline sequence if the variable regions of the antibody are obtained from a system that uses human germline immunoglobulin genes. Such systems include immunizing a transgenic mouse carrying human immunoglobulin genes with the antigen of interest or screening a human immunoglobulin gene library displayed on phage with the antigen of interest. A human antibody that is “the product of or “derived from” a human germline immunoglobulin sequence can be identified as such by comparing the amino acid sequence of the human antibody to the amino acid sequences of human germline immunoglobulins and selecting the human germline immunoglobulin sequence that is closest in sequence (i.e., greatest % identity) to the sequence of the human antibody. A human antibody that is “the product of” or “derived from” a particular human germline immunoglobulin sequence can contain amino acid differences as compared to the germline sequence, due to, for example, naturally-occurring somatic mutations or intentional introduction of site-directed mutation. However, a selected human antibody typically is at least 90% identical in amino acids sequence to an amino acid sequence encoded by a human germline immunoglobulin gene and contains amino acid residues that identify the human antibody as being human when compared to the germline immunoglobulin amino acid sequences of other species (e.g., murine germline sequences). In certain cases, a human antibody can be at least 95%, or even at least 96%, 97%, 98%, or 99% identical in amino acid sequence to the amino acid sequence encoded by the germline immunoglobulin gene. Typically, a human antibody derived from a particular human germline sequence will display no more than 10 amino acid differences from the amino acid sequence encoded by the human germline immunoglobulin gene. In certain cases, the human antibody can display no more than 5, or even no more than 4, 3, 2, or 1 amino acid difference from the amino acid sequence encoded by the germline immunoglobulin gene.

[0756] In some aspects, the anti-FXz antibody or antigen binding portion thereof comprises at least one VH, wherein the VH comprises, consists, or consists essentially of a sequence selected from SEQ ID NOS: 423, 427, or 455.

[0757] In some aspects, the anti-FXz antibody or antigen binding portion thereof comprises at least one VL, wherein the VL comprises, consists, or consists essentially of a sequence selected from SEQ ID NOS: 611, 615, or 643.

[0758] In some aspects, the anti-FXz antibody or antigen binding portion thereof comprises at least one VH and at least one VL, wherein
[0759] (i) at least one VH comprises, consists, or consists essentially of a sequence selected from SEQ ID NOS: 423, 427, or 455; and,
[0760] (ii) at least one VL comprises, consists, or consists essentially of a sequence selected from SEQ ID NOS: 611, 615, or 643.

[0761] In some aspects, the anti-FXz antibody or antigen binding portion thereof, comprises a VH and a VL, wherein

(b1) VH and VL comprise, consist, or consist essentially of SEQ ID NOs: 423 and 611, respectively;
(b2) VH and VL comprise, consist, or consist essentially of SEQ ID NOs: 427 and 615, respectively; or
(b3) VH and VL comprise, consist, or consist essentially of SEQ ID NOs: 455 and 643, respectively.

[0762] In some aspects, the anti-FXz antibody, or antigen binding portion thereof, comprises a VH and a VL, wherein the VH comprises an amino acid sequence at least 70%, at least 80%, at least 90%, at least 95%, at least 96%, at least 97%, at least 98%, at least 99%, or 100% identical to SEQ ID NO: 423 and VL comprises an amino acid sequence at least 70%, at least 80%, at least 90%, at least 95%, at least 96%, at least 97%, at least 98%, at least 99%, or 100% identical to SEQ ID NO: 611.

[0763] In some aspects, the anti-FXz antibody, or antigen binding portion thereof, comprises a VH and a VL, wherein the VH comprises an amino acid sequence at least 70%, at least 80%, at least 90%, at least 95%, at least 96%, at least 97%, at least 98%, at least 99%, or 100% identical to SEQ ID NO: 427 and VL comprises an amino acid sequence at least 70%, at least 80%, at least 90%, at least 95%, at least 96%, at least 97%, at least 98%, at least 99%, or 100% identical to SEQ ID NO: 615.

[0764] In some aspects, the anti-FXz antibody, or antigen binding portion thereof, comprises a VH and a VL, wherein the VH comprises an amino acid sequence at least 70%, at least 80%, at least 90%, at least 95%, at least 96%, at least 97%, at least 98%, at least 99%, or 100% identical to SEQ ID NO: 455 and VL comprises an amino acid sequence at least 70%, at least 80%, at least 90%, at least 95%, at least 96%, at least 97%, at least 98%, at least 99%, or 100% identical to SEQ ID NO: 643.

[0765] In certain aspects, the present anti-FXz antibody, or antigen binding portion thereof, has no detectable binding to FXa. In other aspects, a bispecific molecule of the disclosure comprises an anti-FXz antibody, or antigen binding portion thereof, that specifically binds to FXz and has no detectable binding to FXa and an anti-FIX antibody that specifically binds to both FIXz and FIXa.

### (d) Anti-FXa Binding Molecules

[0766] The present disclosure provides an antibody (e.g., an isolated antibody), or an antigen binding portion thereof, that specifically binds to activated factor X (FXa), wherein the anti-FX antibody or antigen binding portion thereof preferentially binds to FXa in the presence of FXz and FXa. In one embodiment, the FXa is FXa covalently attached to a substrate mimic (i.e., EGR-CMK).

[0767] In some aspects, the anti-FXa antibody, or antigen binding portion thereof, binds to FXa with a binding affinity higher than a binding affinity of the antibody or antigen binding portion thereof to FXz. The present disclosure also provides an isolated anti-FX antibody, or antigen binding portion thereof, which binds to FXa with a binding affinity higher than a binding affinity of the antibody or antigen binding portion thereof to FXz.

[0768] In some aspects, the anti-FXa antibody, or antigen binding portion thereof, binds to FXa with a K_{D} of about 100 nM or less, about 95 nM or less, about 90 nM or less, about 85 nM or less, about 80 nM or less, about 75 nM or less, about 70 nM or less, about 65 nM or less, about 60 nM or less, about 55 nM or less, about 50 nM or less, about 45 nM or less, about 40 nM or less, about 35 nM or less, about 30 nM or less, about 25 nM or less, about 20 nM or less, about 15 nM or less, about 10 nM or less, about 5 nM or less, or about 1 nM or less as determined by a BLI assay.

[0769] In other embodiments, the anti-FXa antibody, or antigen binding portion thereof, binds to FXa with a K_{D} of about 10 nM or less, about 9 nM or less, about 8 nM or less, about 7 nM or less, about 6 nM or less, about 5 nM or less, about 4 nM or less, about 3 nM or less, about 2 nM or less, about 1 nM or less, about 0.5 nM or less, about 0.2 nM or less, about 0.1 nM or less, or about 0.05 nM or less. In yet other embodiments, the anti-FXa antibody, or antigen binding portion thereof, binds to FXa with a K_{D} of 1 nM to 100 nM, 1 nM to 90 nM, 1 nM to 80 nM, 1 nM to 70 nM, 1 nM to 60 nM, 1 nM to 50 nM, 1 nM to 40 nM, 1 nM to 30 nM, 1 nM to 20 nM, 1 nM to 10 nM, 0.1 nM to 100 nM, 0.1 nM to 90 nM, 0.1 nM to 80 nM, 0.1 nM to 70 nM, 0.1 nM to 60 nM, 0.1 nM to 50 nM, 0.1 nM to 40 nM, 0.1 nM to 30 nM, 0.1 nM to 20 nM, 0.1 nM to 10 nM, or 0.1 nM to 1 nM.

[0770] In some aspects, the anti-FXa antibody or an antigen binding portion thereof, cross-competes with a reference antibody selected from the group consisting of the antibodies in FIG. 12C. In some aspects, the anti-FXa antibody or antigen binding portion thereof, binds to the same epitope as a reference antibody selected from the group consisting of the antibodies in FIG. 12C. In some aspects, the anti-FXa or an antigen binding portion thereof, binds to the same epitope as a reference antibody, which is BIIB-12-925.

[0771] In some aspects, the anti-FXa antibody or an antigen binding portion thereof, binds to an antigen binding site (e.g., an epitope) that is substantially the same as the antigen binding site of any anti-FXa antibody or antigen binding portion thereof disclosed herein. In some aspects, the anti-FXa antibody or antigen binding portion thereof, binds to an antigen binding site (e.g., an epitope) that overlaps with the antigen binding site (e.g., epitope) of an anti-FXa antibody or antigen binding portion thereof disclosed herein.

[0772] In some aspects, the anti-FXa antibody or antigen binding portion thereof, comprises a VH CDR1, a VH CDR2, and a VH CDR3, wherein the VH CDR3 sequence comprises a
[0773] (i) a VH CDR3 sequence identical to a VH CDR3 sequence selected from the group consisting of VH CDR3 sequences in FIG. 12C; or,
[0774] (ii) a VH CDR3 sequence identical to a VH CDR3 sequence selected from the group consisting of VH CDR3 sequences in FIG. 12C except for 1, 2, or 3 amino acid substitutions.

[0775] In some aspects, the amino acid substitutions are conservative amino acid substitutions or back mutations

[0776] In some aspects, the anti-FXa antibody or antigen binding portion thereof, comprises a VH CDR1, a VH CDR2, and a VH CDR3, wherein the VH CDR3 sequence comprises an amino acid sequence set forth as (SEQ ID NO: 1919, BIIB-12-925).

[0777] In some aspects, the anti-FXa antibody, or antigen binding portion thereof, comprises a VH CDR1, a VH CDR2, and VH CDR3, wherein the VH CDR1 sequence comprises
[0778] (i) a VH CDR1 sequence identical to a sequence selected from the group consisting of the VH CDR1 sequences disclosed in FIG. 12C, or
[0779] (ii) a VH CDR1 sequence identical to a sequence selected from the group consisting of the VH CDR1 sequences disclosed in FIG. 12C except for 1, 2, or 3 amino acid substitutions.

[0780] In some aspects, the anti-FXa antibody, or antigen binding portion thereof, comprises a VH CDR1, a VH CDR2, and a VH CDR3, wherein the VH CDR2 sequence comprises
[0781] (i) a VH CDR2 sequence identical to a sequence selected from the group consisting of the VH CDR2 sequences disclosed in FIG. 12C, or
[0782] (ii) a VH CDR2 sequence identical to a sequence selected from the group consisting of the VH CDR2 sequences disclosed in FIG. 12C except for 1, 2, or 3 amino acid substitutions.

[0783] In some aspects, the anti-FXa antibody or antigen binding portion thereof, comprises a VL CDR1, a VL CDR2, and a VL CDR3, wherein the VL CDR1 sequence comprises
[0784] (i) a VL CDR1 sequence identical to a sequence selected from the group consisting of the VL CDR1 sequences disclosed in FIG. 12C, or
[0785] (ii) a VL CDR1 sequence identical to a sequence selected from the group consisting of the VL CDR1 sequences disclosed in FIG. 12C except for 1, 2, or 3 amino acid substitutions.

[0786] In some aspects, the anti-FXa antibody or antigen binding portion thereof, comprises a VL CDR1, a VL CDR2, and a VL CDR3, wherein the VL CDR2 sequence comprises
[0787] (i) a VL CDR2 sequence identical to a sequence selected from the group consisting of the VL CDR2 sequences in FIG. 12C, or
[0788] (ii) a VL CDR2 sequence identical to a sequence selected from the group consisting of the VL CDR2 sequences in FIG. 12C except for 1, 2, or 3 amino acid substitutions.

[0789] In some aspects, the anti-FXa antibody or antigen binding portion thereof, comprises a VL CDR1, a VL CDR2, and a VL CDR3, wherein the VL CDR3 sequence comprises
[0790] (i) a VL CDR3 sequence identical to a sequence selected from the group consisting of the VL CDR3 sequences disclosed in FIG. 12C, or
[0791] (ii) a VL CDR3 sequence identical to a sequence selected from the group consisting of the VL CDR3 sequences disclosed in FIG. 12C except for 1, 2, or 3 amino acid substitutions.

[0792] In some aspects, the anti-FXa antibody or antigen binding portion thereof, comprises a VL CDR1, a VL CDR2, and a VL CDR3, wherein the VL CDR3 sequence consists or consists essentially of
[0793] (i) a VL CDR3 sequence identical to a sequence selected from the group consisting of the VL CDR3 sequences disclosed in FIG. 12C, or
[0794] (ii) a VL CDR3 sequence identical to a sequence selected from the group consisting of the VL CDR3 sequences disclosed in FIG. 12C except for 1, 2, or 3 amino acid substitutions.

[0795] The present disclosure also provides an isolated antibody, or antigen binding portion thereof, which specifically binds to FXa, comprising a VH CDR1, a VH CDR2, and a VH CDR3 and a VL CDR1, a VL CDR2, and a VL CDR3, wherein the VH CDR1, VH CDR2, and VH CDR3 and the VL CDR1, VL CDR2, and VL CDR3 comprise the VH CDR1, VH CDR2, and VH CDR3 and the VL CDR1, VL CDR2, and VL CDR3 of an anti-FXa antibody selected from the group consisting of BIIB-12-894, BIIB-12-925, BIIB-12-1320, or BIIB-12-1321.

[0796] In some aspects, the anti-FXa antibody, or antigen binding portion thereof, comprises VH CDR1, VH CDR2, and VH CDR3 sequences comprising SEQ ID NO: 1911, SEQ ID NO: 1915, and SEQ ID NO: 1919, respectively, and/or VL CDR1, VL CDR2, and VL CDR3 sequences comprising SEQ ID NO: 1923, SEQ ID NO: 1927, and SEQ ID NO: 1931, respectively.

[0797] In some aspects, the anti-FXa antibody or antigen binding portion thereof, comprises a VH and a VL, wherein the VH comprises an amino acid sequence which is at least about 70%, at least about 75%, at least about 80%, at least about 85%, at least about 90%, at least about 95%, at least about 96%, at least about 97%, at least about 98%, at least about 99%, or about 100% identical to the amino acid sequence selected from the group consisting of SEQ ID NOs: 557, 559, 561, and 563.

[0798] In some aspects, the anti-FXa antibody or antigen binding portion thereof, comprises a VH and a VL, wherein the VL comprises an amino acid sequence which is at least about 70%, at least about 75%, at least about 80%, at least about 85%, at least about 90%, at least about 95%, at least about 96%, at least about 97%, at least about 98%, at least about 99%, or about 100% identical to the amino acid sequence selected from the group consisting of SEQ ID NOs: 745, 747, 749, and 751.

[0799] In some aspects, the anti-FXa antibody or antigen binding portion thereof, comprises a VH and a VL, wherein

(i) the VH comprises an amino acid sequence which is at least about 70%, at least about 75%, at least about 80%, at least about 85%, at least about 90%, at least about 95%, at least about 96%, at least about 97%, at least about 98%, at least about 99%, or about 100% identical to the amino acid sequence selected from the group consisting of SEQ ID NOs: 557, 559, 561, and 563; and,
(ii) the VL comprises an amino acid sequence which is at least about 70%, at least about 75%, at least about 80%, at least about 85%, at least about 90%, at least about 95%, at least about 96%, at least about 97%, at least about 98%, at least about 99%, or about 100% identical to the amino acid sequence selected from the group consisting of SEQ ID NOs: 745, 747, 749, and 751.

[0800] In certain embodiments, an anti-FIXa antibody comprises a heavy chain variable region from a particular germline heavy chain immunoglobulin gene and/or a light chain variable region from a particular germline light chain immunoglobulin gene. In some embodiments, the VH sequence of the anti-FXa antibody can be derived from any one of V, D, or J germline sequences and/or the VL sequence of the anti-FXa antibody can be derived from any one of kappa or lambda germline sequence.

[0801] As demonstrated herein, human antibodies specific for FXa have been prepared that comprise a heavy chain variable region that is the product of or derived from a human germline gene. Accordingly, provided is an anti-FXa antibody or antigen binding portion thereof, comprising a VH and a VL, wherein the VH is derived from a germline sequence of VH1-18, VH1-46, VH3-21, VH3-23, VH3-30, VH4-31, VH4-39, VH4-0B, or VH5-51. In some aspects, the anti-FXa antibody or antigen binding portion thereof, comprises a VH and a VL, wherein the VL is derived from a germline sequence of VK1-05, VK1-12, VK1-39, VK2-28, VK3-11, VK3-15, VK3-20, or VK4-01. In some aspects, the anti-FXa antibody or antigen binding portion thereof, comprises a VH and a VL, wherein the VH is derived from a germline sequence of VH1-18.0, VH1-18.1, VH1-18.8, VH1-46.0, VH1-46.4, VH1-46.5, VH1-46.6, VH1-46.7, VH1-46.8, VH1-46.9, VH3-21.0, VH3-23.0, VH3-23.2, VH3-23.6, VH3-30.0, VH4-31.5, VH4-39.0, VH4-39.5. VH4-0B.4, or VH5-51.1, and the VL is derived from a germline sequence of VK1-05.6, VK1-05.12, VK1-12.0, VK1-12.4, VK1-12.7, VK1-12.10, VK1-12.15, VK1-39.0, VK1-39.3, VK1-39.15, VK2-28.0, VK2-28.1, VK2-28.5, VK3-11.0, VK3-11.2, VK3-11.6, VK3-11.14, VK3-15.0, VK3-15.8, VK3-15.10, VK3-20.0, VK3-20.1, VK3-20.4, VK3-20.5, VK4-01.0, VK4-01.4, VK4-01.20. In some aspects, the VH and/or the VL are derived from their respective germlines via affinity optimization

[0802] In some aspects, the anti-FXa antibody, or antigen binding portion thereof, comprises a VH and a VL, wherein the VH comprises an amino acid sequence at least 70%, at least 80%, at least 90%, at least 95%, at least 96%, at least 97%, at least 98%, at least 99%, or 100% identical to SEQ ID NO: 559 and VL comprises an amino acid sequence at least 70%, at least 80%, at least 90%, at least 95%, at least 96%, at least 97%, at least 98%, at least 99%, or 100% identical to SEQ ID NO: 747.

### (e) Common Aspects

[0803] Certain aspects of the present disclosure pertains to an anti-FIX antibody (e.g., anti-FIXa antibody or anti-FIXz antibody) and anti-FX antibody (e.g., anti-FXa antibody or anti-FXz antibody) disclosed herein comprising the VH and VL CDR sequences disclosed herein, yet containing different framework sequences from the antibodies disclosed herein. Such framework sequences can be obtained from public DNA databases or published references that include germline antibody gene sequences. For example, germline DNA sequences for human heavy and light chain variable region genes can be found in the “VBase” human germline sequence database (available on the Internet at www.mrc-cpe.cam.ac.uk/vbase), as well as in Kabat, E. A., et al. (1991) Sequences of Proteins of Immunological Interest, Fifth Edition, U.S. Department of Health and Human Services, NIH Publication No. 91-3242; Tomlinson, I. M., et al. (1992) “The Repertoire of Human Germline VH Sequences Reveals about Fifty Groups of VH Segments with Different Hypervariable Loops” Mol. Biol. 227:776-798; and Cox, J. P. L. et al. (1994) “A Directory of Human Germ-line VH Segments Reveals a Strong Bias in their Usage” Eur. J. Immunol. 24:827-836; the contents of each of which are expressly incorporated herein by reference.

[0804] Exemplary framework sequences for use in the antibodies described herein are those that are structurally similar to the framework sequences used by antibodies described herein. The VH CDR1, 2 and 3 sequences, and the VL CDR1, 2 and 3 sequences, can be grafted onto framework regions that have the identical sequence as that found in the germline immunoglobulin gene from which the framework sequence derive, or the CDR sequences can be grafted onto framework regions that contain one or more mutations as compared to the germline sequences. For example, it has been found that in certain instances it is beneficial to mutate residues within the framework regions to maintain or enhance the antigen binding ability of the antibody (see e.g., U.S. Pat. Nos. 5,530,101; 5,585,089; 5,693,762 and 6,180,370 to Queen et al).

[0805] Engineered antibodies described herein include those in which modifications have been made to framework residues within VH and/or VL, e.g., to improve the properties of the antibody. Typically such framework modifications are made to decrease the immunogenicity of the antibody. For example, one approach is to “backmutate” one or more framework residues to the corresponding germline sequence. More specifically, an antibody that has undergone somatic mutation may contain framework residues that differ from the germline sequence from which the antibody is derived. Such residues can be identified by comparing the antibody framework sequences to the germline sequences from which the antibody is derived. To return the framework region sequences to their germline configuration, the somatic mutations can be “backmutated” to the germline sequence by, for example, site-directed mutagenesis or PCR-mediated mutagenesis. Such “backmutated” antibodies are also intended to be encompassed. Another type of framework modification involves mutating one or more residues within the framework region, or even within one or more CDR regions, to remove T cell epitopes to thereby reduce the potential immunogenicity of the antibody. This approach is also referred to as “deimmunization” and is described in further detail in U.S. Patent Publication No. 20030153043 by Carr et al.

[0806] Another type of variable region modification is to mutate amino acid residues within the VH and/or VL CDR1, CDR2 and/or CDR3 regions to thereby improve one or more binding properties (e.g., affinity) of the antibody of interest. Site-directed mutagenesis or PCR-mediated mutagenesis can be performed to introduce the mutation(s) and the effect on antibody binding, or other functional property of interest, can be evaluated in in vitro or in vivo assays as described herein and provided in the Examples. In some embodiments, conservative modifications (as discussed above) are introduced. The mutations can be amino acid substitutions, additions or deletions. Moreover, typically no more than one, two, three, four or five residues within a CDR region are altered.

[0807] In some aspects, methionine residues in CDRs of antibodies can be oxidized, resulting in potential chemical degradation and consequent reduction in potency of the antibody. Accordingly, also provided are anti-FIX/FX antibodies which have one or more methionine residues in the heavy and/or light chain CDRs replaced with amino acid residues which do not undergo oxidative degradation. In one embodiment, the methionine residues in the CDRs of the antibodies disclosed herein are replaced with amino acid residues which do not undergo oxidative degradation. Similarly, deamidation sites may be removed from any of the antibodies, particularly in the CDRs.

[0808] In certain aspects, any one of the anti-FIX antibodies (e.g., anti-FIXa antibodies or anti-FIXz antibodies) and anti-FX antibodies (e.g., anti-FXa antibodies or anti-FXz antibodies) disclosed herein can be an IgG. In some aspects, the IgG is an IgG1, an IgG2, an IgG3, an IgG4 or a variant thereof. In some aspects, any one of the anti-FIX antibodies (e.g., anti-FIXa antibodies or anti-FIXz antibodies) and anti-FX antibodies (e.g., anti-FXa antibodies or anti-FXz antibodies) disclosed herein is an IgG4 antibody. In some aspects, an anti-FIX antibody (e.g., anti-FIXa antibody or anti-FIXz antibody) and anti-FX antibody (e.g., anti-FXa antibody or anti-FXz antibody) disclosed herein comprises an effectorless IgG4 Fc.

[0809] In some aspects, the heavy chain constant region or fragment thereof of an anti-FIX antibody (e.g., anti-FIXa antibody or anti-FIXz antibody) or anti-FX antibody (e.g., anti-FXa antibody or anti-FXz antibody) is an IgG constant region. In some aspects, the IgG constant region or fragment thereof is an IgG1, IgG2, IgG3, or IgG4 constant region. In some aspects, an anti-FIX antibody (e.g., anti-FIXa antibody or anti-FIXz antibody) or anti-FX antibody (e.g., anti-FXa antibody or anti-FXz antibody) comprises a VL comprising a light chain constant region (LC), wherein the LC constant region is a kappa constant region. In some aspects, an anti-FIX antibody (e.g., anti-FIXa antibody or anti-FIXz antibody) or anti-FX antibody (e.g., anti-FXa antibody or anti-FXz antibody) comprises a VL comprising a light chain constant region (LC), wherein the LC constant region is a lambda constant region.

[0810] In some aspects, an anti-FIX antibody (e.g., anti-FIXa antibody or anti-FIXz antibody) or anti-FX antibody (e.g., anti-FXa antibody or anti-FXz antibody) comprises a heavy chain constant region (CH). In some aspects, an anti-FIX antibody (e.g., anti-FIXa antibody or anti-FIXz antibody) or anti-FX antibody (e.g., anti-FXa antibody or anti-FXz antibody) comprises a CH1 domain, CH2 domain, or CH3 domain.

[0811] In some aspects, a FIX or FX antigen binding portion thereof comprises an Fab, Fab′, F(ab′)2, Fv, or a single chain Fv (scFv). In other aspects, a FIX or FX antigen binding portion thereof comprises an Fd, scFv, disulfide stabilized scFv, a disulfide linked Fv, a V-NAR domain, an IgNar, an intrabody, an IgG CH2, a minibody, a F(ab′)₃, a tetrabody, a triabody, a diabody, a single-domain antibody, DVD-Ig, Fcab, mAb², a (scFv)₂, or a scFv-Fc.

[0812] In some aspects, the anti-FIX antibody (e.g., anti-FIXa antibody or anti-FIXz antibody) or anti-FX antibody (e.g., anti-FXa antibody or anti-FXz antibody) disclosed herein are monospecific. In other aspects, the anti-FIX antibody (e.g., anti-FIXa antibody or anti-FIXz antibody) or anti-FX antibody (e.g., anti-FXa antibody or anti-FXz antibody) is bispecific, trispecific, tetraspecific, etc. In other aspects, the anti-FIX antibody (e.g., anti-FIXa antibody or anti-FIXz antibody) or anti-FX antibody (e.g., anti-FXa antibody or anti-FXz antibody) is multispecific. In some aspects, the anti-FIX antibody (e.g., anti-FIXa antibody or anti-FIXz antibody) or anti-FX antibody (e.g., anti-FXa antibody or anti-FXz antibody) is monovalent, bivalent, trivalent, tetravalent, etc. In yet other aspects, the anti-FIX antibody (e.g., anti-FIXa antibody or anti-FIXz antibody) or anti-FX antibody (e.g., anti-FXa antibody or anti-FXz antibody) is multivalent. In specific aspects, the anti-FIX antibody (e.g., anti-FIXa antibody or anti-FIXz antibody) or anti-FX antibody (e.g., anti-FXa antibody or anti-FXz antibody) is bivalent, e.g., an antibody comprising several specific antigen binding sites. In specific aspects, the anti-FIX antibody (e.g., anti-FIXa antibody or anti-FIXz antibody) or anti-FX antibody (e.g., anti-FXa antibody or anti-FXz antibody) is bispecific, i.e., the molecule can specifically bind to two different antigens (e.g., two different epitopes on the same or different molecules). In some specific aspects, the anti-FIX antibody (e.g., anti-FIXa antibody or anti-FIXz antibody) or anti-FX antibody (e.g., anti-FXa antibody or anti-FXz antibody) is bivalent and bispecific, e.g., an antibody comprising four two-binding sites that are capable of binding to two different antigens (e.g., two different epitopes on the same or different molecules).

[0813] In some aspects, the anti-FIX antibody (e.g., anti-FIXa antibody or anti-FIXz antibody) or anti-FX antibody (e.g., anti-FXa antibody or anti-FXz antibody) disclosed herein is a human antibody, an engineered antibody, a chimeric antibody, a humanized antibody, or an optimized antibody. In some aspects the optimized antibody is an affinity optimized antibody. In some aspects, the antibody has been optimized for desirable physicochemical or functional property, e.g., extended plasma half-life, low aggregation, thermal stability, etc.

### III. Bispecific Anti-FIXa/Anti-FXz Binding Molecules

[0814] The present disclosure also provides bispecific molecules comprising an anti-FIX specificity (e.g., an anti-FIXa antibody or antigen binding portion disclosed herein or an anti-FIXz antibody or antigen binding portion thereof disclosed herein) linked to a molecule having a second binding specificity. Also provided are bispecific molecules comprising an anti-FX specificity (e.g., an anti-FXz antibody or antigen binding portion thereof disclosed herein or an anti-FXa antibody or antigen binding portion thereof disclosed herein) linked to a molecule having a second binding specificity. Also provided is a bispecific molecule comprising (i) an anti-FIX specificity (e.g., an anti-FIXa antibody or antigen binding portion disclosed herein or an anti-FIXz antibody or antigen binding portion thereof disclosed herein), linked to (ii) an anti-FXz specificity (e.g., an anti-FXz antibody or antigen binding portion thereof disclosed herein or an anti-FXa antibody or antigen binding portion thereof disclosed herein). The bispecific molecules disclosed herein are not limited to bispecific molecules with an immunoglobulin architecture or a structure derived from an antibody for example by rearranging domains. The bispecific molecules disclosed herein comprise also molecular scaffolds onto which the CDRs disclosed herein or combinations thereof can be grafted (e.g., fibronectin III or tenascin-C scaffolds).

[0815] In some aspects, the bispecific molecule cross-competes with a reference bispecific antibody, wherein the reference bispecific antibody comprises a VH and a VL of an anti-FIXa antibody selected from the group consisting of the anti-FIXa antibodies in FIG. 3A and a VH and a VL of an anti-FXz antibody selected from the group consisting of the anti-FX antibodies in FIG. 12A and FIG. 12B. In other aspects, the bispecific molecule cross-competes with a reference bispecific antibody, wherein the reference bispecific antibody comprises a VH and a VL of an anti-FIXa antibody selected from the group consisting of the anti-FIXa antibodies in FIG. 3B and a VH and a VL of an anti-FXz antibody selected from the group consisting of the anti-FXz antibodies in FIG. 12A and FIG. 12B. In some aspects, the bispecific molecule cross-competes with a reference bispecific antibody, wherein the reference bispecific antibody comprises a VH and a VL of an anti-FIXa antibody selected from the group consisting of the anti-FIXa antibodies in FIG. 3C and a VH and a VL of an anti-FXz antibody selected from the group consisting of the anti-FXz antibodies in FIG. 12A and FIG. 12B.

[0816] In certain aspects, the bispecific molecule cross-competes with a reference bispecific antibody, wherein the reference bispecific antibody comprises a VH and a VL of an anti-FIXz antibody selected from the group consisting of the anti-FIXz antibodies in FIG. 3D and a VH and a VL of an anti-FXz antibody selected from the group consisting of the anti-FXz antibodies in FIG. 12A and FIG. 12B.

[0817] Other aspects of the disclosure also provides a bispecific molecule cross-competing with a reference bispecific antibody, wherein the reference bispecific antibody comprises a VH and a VL of an anti-FIXa antibody selected from the group consisting of the anti-FIXa antibodies in FIG. 3A and a VH and a VL of an anti-FXa antibody selected from the group consisting of the anti-FXa antibodies in FIG. 12C. In some embodiments, the bispecific molecule cross-competes with a reference bispecific antibody, wherein the reference bispecific antibody comprises a VH and a VL of an anti-FIXa antibody selected from the group consisting of the anti-FIXa antibodies in FIG. 3B and a VH and a VL of an anti-FXa antibody selected from the group consisting of the anti-FXa antibodies in FIG. 12C. In other embodiments, the bispecific molecule cross-competes with a reference bispecific antibody, wherein the reference bispecific antibody comprises a VH and a VL of an anti-FIXa antibody selected from the group consisting of the anti-FIXa antibodies in FIG. 3C and a VH and a VL of an anti-FXa antibody selected from the group consisting of the anti-FXa antibodies in FIG. 12C. In yet other embodiments, the bispecific molecule cross-competes with a reference bispecific antibody, wherein the reference bispecific antibody comprises a VH and a VL of an anti-FIXz antibody selected from the group consisting of the anti-FIXz antibodies in FIG. 3D and a VH and a VL of an anti-FXa antibody selected from the group consisting of the anti-FXa antibodies in FIG. 12C.

[0818] In some aspects, the bispecific molecule binds to the same epitope as a reference bispecific antibody, wherein the reference bispecific antibody comprises a VH and a VL of an anti-FIXa antibody selected from the group consisting of the anti-FIXa antibodies in FIG. 3A and a VH and a VL of an anti-FXz antibody selected from the group consisting of the anti-FXz antibodies in FIG. 12A and FIG. 12B. In other aspects, the bispecific molecule binds to the same epitope as a reference bispecific antibody, wherein the reference bispecific antibody comprises a VH and a VL of an anti-FIXa antibody selected from the group consisting of the anti-FIXa antibodies in FIG. 3B and a VH and a VL of an anti-FXz antibody selected from the group consisting of the anti-FXz antibodies in FIG. 12A and FIG. 12B. In yet other aspects, the bispecific molecule binds to the same epitope as a reference bispecific antibody, wherein the reference bispecific antibody comprises a VH and a VL of an anti-FIXa antibody selected from the group consisting of the anti-FIXa antibodies in FIG. 3C and a VH and a VL of an anti-FXz antibody selected from the group consisting of the anti-FXz antibodies in FIG. 12A and FIG. 12B.

[0819] In some other aspects, the bispecific molecule binds to the same epitope as a reference bispecific antibody, wherein the reference bispecific antibody comprises a VH and a VL of an anti-FIXz antibody selected from the group consisting of the anti-FIXz antibodies in FIG. 3D and a VH and a VL of an anti-FXz antibody selected from the group consisting of the anti-FXz antibodies in FIG. 12A and FIG. 12B. In still other aspects, the bispecific molecule binds to the same epitope as a reference bispecific antibody, wherein the reference bispecific antibody comprises a VH and a VL of an anti-FIXz antibody selected from the group consisting of the anti-FIXz antibodies in FIG. 3D and a VH and a VL of an anti-FXa antibody selected from the group consisting of the anti-FXa antibodies in FIG. 12C.

[0820] In some aspects, the bispecific molecule binds to the same epitope as a reference bispecific antibody, wherein the reference bispecific antibody comprises a VH and a VL of an anti-FIXa antibody selected from the group consisting of the anti-FIXa antibodies in FIG. 3A and a VH and a VL of an anti-FXa antibody selected from the group consisting of the anti-FXa antibodies in FIG. 12C. In some aspects, the bispecific molecule binds to the same epitope as a reference bispecific antibody, wherein the reference bispecific antibody comprises a VH and a VL of an anti-FIXa antibody selected from the group consisting of the anti-FIXa antibodies in FIG. 3B and a VH and a VL of an anti-FXa antibody selected from the group consisting of the anti-FXa antibodies in FIG. 12C. In other aspects, In some aspects, the bispecific molecule binds to the same epitope as a reference bispecific antibody, wherein the reference bispecific antibody comprises a VH and a VL of an anti-FIXa antibody selected from the group consisting of the anti-FIXa antibodies in FIG. 3C and a VH and a VL of an anti-FXa antibody selected from the group consisting of the anti-FXa antibodies in FIG. 12C.

[0821] In some aspects, the bispecific molecule comprises

(i) an anti-FIXa antibody, or antigen binding portion thereof, comprising a VH CDR1, a VH CDR2, and a VH CDR3, and a VL CDR1, a VL CDR2, and a VL CDR3, wherein the VH CDR1, VH CDR2, and VH CDR3 and the VL CDR1, VL CDR2, and VL CDR3 are selected from the group consisting of VH CDR1s, VH CDR2s, and VH CDR3s and VL CDR1s, VL CDR2s, and VL CDR3s of the anti-FIXa (BIIB-9) antibodies in FIGS. 3A, 3B, 3C, and 3D (e.g., the CDRs of FIGS. 15A, 15B, 15C, and 15D); and
(ii) an anti-FX antibody, or antigen binding portion thereof, comprising, comprises VH CDR1, VH CDR2, and VH CDR3, and VL CDR1, VL CDR2, and VL CDR3, wherein the VH CDR1, VH CDR2, and VH CDR3 and the VL CDR1, VL CDR2, and VL CDR3 are selected from the group consisting of VH CDR1s, VH CDR2s, and VH CDR3s and VL CDR1s, VL CDR2s, and VL CDR3s of the anti-FX (BIIB-12) antibodies in FIGS. 12A and 12B (e.g., the CDRS of FIGS. 15A, 15B, 15C, and 15D).

[0822] In some aspects, the bispecific molecule comprises

(a) an anti-FIX antibody, or antigen binding portion thereof, comprising:

[0823] (a1) VH CDR1, VH CDR2, and VH CDR3 sequences comprising SEQ ID NOs: 815, 860, or 905, respectively, and/or VL CDR1, VL CDR2, and VL CDR3 sequences comprising SEQ ID NOs: 950, 995, or 1040, respectively; (BIIB-9-484)

[0824] (a2) VH CDR1, VL CDR2, and VL CDR3 sequences comprising SEQ ID NOs: 822, 867, or 912, respectively, and/or VL CDR1, VL CDR2, and VL CDR3 sequences comprising SEQ ID NOs: 957, 1002, or 1047, respectively; (BIIB-9-619)

[0825] (a3) VH CDR1, VH CDR2, and VH CDR3 sequences comprising SEQ ID NOs: 1347, 1351, or 1355, respectively, and/or VL CDR1, VL CDR2, and VL CDR3 sequences comprising SEQ ID NOs: 1359, 1363, or 1367, respectively; (BIIB-9-578)

[0826] (a4) VH CDR1, VH CDR2, and VH CDR3 sequences comprising SEQ ID NOs: 843, 888, or 933, respectively, and/or VL CDR1, VL CDR2, and VL CDR3 sequences comprising SEQ ID NOs: 978, 1023, or 1068, respectively; (BIIB-9-1335) or,

[0827] (a5) VH CDR1, VH CDR2, and VH CDR3 sequences comprising SEQ ID NOs: 844, 889, or 934, respectively, and/or VL CDR1, VL CDR2, and VL CDR3 sequences comprising SEQ ID NOs: 979, 1024, or 1069, respectively; (BIIB-9-1336) and,

(b) an anti-FX antibody, or antigen binding portion thereof, comprising:

[0828] (b1) VH CDR1, VH CDR2, and VH CDR3 sequences comprising SEQ ID NOs: 1393, 1483, or 1573, respectively, and/or VL CDR1, VL CDR2, and VL CDR3 sequences comprising SEQ ID NOs: 1663, 1753, or 1843, respectively; (BIIB-12-915)

[0829] (b2) VH CDR1, VH CDR2, and VH CDR3 sequences comprising SEQ ID NOs: 1395, 1485, or 1575, respectively, and/or VL CDR1, VL CDR2, and VL CDR3 sequences comprising SEQ ID NOs: 1665, 1755, or 1845, respectively; (BIIB-12-917)

[0830] (b3) VH CDR1, VH CDR2, and VH CDR3 sequences comprising SEQ ID NOs: 1911, 1915, or 1919, respectively, and/or VL CDR1, VL CDR2, and VL CDR3 sequences comprising SEQ ID NOs: 1923, 1927, or 1931, respectively; (BIIB-12-925)

[0831] (b4) VH CDR1, VH CDR2, and VH CDR3 sequences comprising SEQ ID NOs: 1409, 1499, or 1589, respectively, and/or VL CDR1, VL CDR2, and VL CDR3 sequences comprising SEQ ID NOs: 1679, 1769, or 1859, respectively; or (BIIB-12-932)

[0832] (b5) VH CDR1, VH CDR2, and VH CDR3 sequences comprising SEQ ID NOs: 1433, 1523, or 1613, respectively, and/or VL CDR1, VL CDR2, and VL CDR3 sequences comprising SEQ ID NOs: 1703, 1793, or 1883, respectively. (BIIB-12-1306)

[0833] In some aspects, the bispecific molecule comprises

(a) an anti-FIX antibody, or antigen binding portion thereof, comprising:

[0834] (a1) a VH and a VL comprising SEQ ID NOs: 31 and 221, respectively; (BIIB-9-484)

[0835] (a2) a VH and a VL comprising SEQ ID NOs: 45 and 235, respectively; (BIIB-9-619)

[0836] (a3) a VH and a VL comprising SEQ ID NOs: 185 and 371, respectively; (BIIB-9-578)

[0837] (a4) a VH and a VL comprising SEQ ID NOs: 87 and 221, respectively; or (BIIB-9-1335)

[0838] (a5) a VH and a VL comprising SEQ ID NOs: 89 and 221, respectively; (BIIB-9-1336)

(b) an anti-FX antibody, or antigen binding portion thereof, comprising:

[0839] (b1) a VH and a VL comprising SEQ ID NOs: 423 and 611, respectively; (BIIB-12-915)

[0840] (b2) a VH and a VL comprising SEQ ID NOs: 427 and 615, respectively; (BIIB-12-917)

[0841] (b3) a VH and a VL comprising SEQ ID NOs: 559 and 747, respectively; (BIIB-12-925)

[0842] (b4) a VH and VL comprising SEQ ID NOs: 455 and 643, respectively; or (BIIB-12-932)

[0843] (b5) a VH and a VL comprising SEQ ID NOs: 503 and 691, respectively. (BIIB-12-1306)

[0844] In some aspects, the bispecific molecule comprises an anti-FIX antibody, or antigen binding portion thereof (i.e., an anti-FIXa or an anti-FIXz antibody or antigen binding portion thereof), and an anti-FX antibody, or antigen binding portion thereof (i.e., an anti-FXz or anti-FXa antibody or antigen binding portion thereof) wherein

(i) the anti-FIXa antibody, or antigen binding portion thereof, comprises a VH and a VL comprising SEQ ID NOs: 31 and 221, respectively; (BIIB-9-484) and the anti-FXz antibody, or antigen binding portion thereof, comprises a VH and a VL comprising SEQ ID NOs: 423 and 611, respectively; (BIIB-12-915);
(ii) the anti-FIXa antibody, or antigen binding portion thereof, comprises a VH and a VL comprising SEQ ID NOs: 31 and 221, respectively; (BIIB-9-484) and the anti-FXz antibody, or antigen binding portion thereof, comprises a VH and a VL comprising SEQ ID NOs: 427 and 615, respectively; (BIIB-12-917);
(iii) the anti-FIXa antibody, or antigen binding portion thereof, comprises a VH and a VL comprising SEQ ID NOs: 31 and 221, respectively; (BIIB-9-484) and the anti-FXa antibody, or antigen binding portion thereof, comprises a VH and a VL comprising SEQ ID NOs: 559 and 747, respectively; (BIIB-12-925);
(iv) the anti-FIXa antibody, or antigen binding portion thereof, comprises a VH and a VL comprising SEQ ID NOs: 31 and 221, respectively; (BIIB-9-484) and the anti-FXz antibody, or antigen binding portion thereof, comprises a VH and a VL comprising SEQ ID NOs: 455 and 643, respectively; or (BIIB-12-932);
(v) the anti-FIXz antibody, or antigen binding portion thereof, comprises a VH and a VL comprising SEQ ID NOs: 185 and 371, respectively; (BIIB-9-578) and the anti-FXz antibody, or antigen binding portion thereof, comprises a VH and a VL comprising SEQ ID NOs: 423 and 611, respectively; (BIIB-12-915);
(vi) the anti-FIXz antibody, or antigen binding portion thereof, comprises a VH and a VL comprising SEQ ID NOs: 185 and 371, respectively; (BIIB-9-578) and the anti-FXz antibody, or antigen binding portion thereof, comprises a VH and a VL comprising SEQ ID NOs: 427 and 615, respectively; (BIIB-12-917);
(vii) the anti-FIXa antibody, or antigen binding portion thereof, comprises a VH and a VL comprising SEQ ID NOs: 45 and 235, respectively; (BIIB-9-619) and the anti-FXz antibody, or antigen binding portion thereof, comprises a VH and a VL comprising SEQ ID NOs: 427 and 615, respectively; or (BIIB-12-917)
(viii) the anti-FIXa antibody, or antigen binding portion thereof, comprises a VH and a VL comprising SEQ ID NOs: 45 and 235, respectively; (BIIB-9-619) and the anti-FXa antibody, or antigen binding portion thereof, comprises a VH and a VL comprising SEQ ID NOs: 559 and 747, respectively; (BIIB-12-925).

[0845] In some aspects, the bispecific molecule comprises an anti-FIXa antibody, or antigen binding portion thereof, comprising a VH and a VL, wherein the VH comprises an amino acid sequence at least 70%, at least 80%, at least 90%, at least 95%, at least 96%, at least 97%, at least 98%, at least 99%, or 100% identical to a VH sequence disclosed in TABLE 6 and VL comprises an amino acid sequence at least 70%, at least 80%, at least 90%, at least 95%, at least 96%, at least 97%, at least 98%, at least 99%, or 100% identical to a VL sequence disclosed in TABLE 6.

[0846] In some aspects, the bispecific molecule comprises an anti-FIXa antibody or antigen binding portion thereof, comprising a VH CDR1, a VH CDR2, and a VH CDR3, wherein the VH CDR1 sequence comprises
[0847] (iii) a VH CDR1 sequence identical to a sequence selected from the group consisting of the VH CDR1 sequences disclosed in TABLE 7, or
[0848] (iv) a VH CDR1 sequence identical to a sequence selected from the group consisting of the VH CDR1 sequences disclosed in TABLE 7 except for 1, 2, or 3 amino acid substitutions.

[0849] In some aspects, the bispecific molecule comprises an anti-FIXa antibody or antigen binding portion thereof, comprising a VH CDR1, a VH CDR2, and a VH CDR3, wherein the VH CDR2 sequence comprises
[0850] (iii) a VH CDR2 sequence identical to a sequence selected from the group consisting of the VH CDR2 sequences in TABLE 7, or
[0851] (iv) a VH CDR2 sequence identical to a sequence selected from the group consisting of the VH CDR2 sequences in TABLE 7 except for 1, 2, or 3 amino acid substitutions.

[0852] In some aspects, the bispecific molecule comprises an anti-FIXa antibody or antigen binding portion thereof, comprising a VH CDR1, a VH CDR2, and a VH CDR3, wherein the VH CDR3 sequence comprises
[0853] (iii) a VH CDR3 sequence identical to a sequence selected from the group consisting of the VH CDR3 sequences disclosed in TABLE 7, or
[0854] (iv) a VH CDR3 sequence identical to a sequence selected from the group consisting of the VH CDR3 sequences disclosed in TABLE 7 except for 1, 2, or 3 amino acid substitutions.

[0855] In some aspects, the bispecific molecule comprises an anti-FIXa antibody or antigen binding portion thereof, comprising a VL CDR1, a VL CDR2, and a VL CDR3, wherein the VL CDR1 sequence comprises
[0856] (v) a VL CDR1 sequence identical to a sequence selected from the group consisting of the VL CDR1 sequences disclosed in TABLE 7, or
[0857] (vi) a VL CDR1 sequence identical to a sequence selected from the group consisting of the VL CDR1 sequences disclosed in TABLE 7 except for 1, 2, or 3 amino acid substitutions.

[0858] In some aspects, the bispecific molecule comprises an anti-FIXa antibody or antigen binding portion thereof, comprising a VL CDR1, a VL CDR2, and a VL CDR3, wherein the VL CDR2 sequence comprises
[0859] (v) a VL CDR2 sequence identical to a sequence selected from the group consisting of the VL CDR2 sequences in TABLE 7, or
[0860] (vi) a VL CDR2 sequence identical to a sequence selected from the group consisting of the VL CDR2 sequences in TABLE 7 except for 1, 2, or 3 amino acid substitutions.

[0861] In some aspects, the bispecific molecule comprises an anti-FIXa antibody or antigen binding portion thereof, comprising a VL CDR1, a VL CDR2, and a VL CDR3, wherein the VL CDR3 sequence comprises
[0862] (v) a VL CDR3 sequence identical to a sequence selected from the group consisting of the VL CDR3 sequences disclosed in TABLE 7, or
[0863] (vi) a VL CDR3 sequence identical to a sequence selected from the group consisting of the VL CDR3 sequences disclosed in TABLE 7 except for 1, 2, or 3 amino acid substitutions.

[0864] In some aspects, the anti-FIXa antibody or antigen binding portion thereof, comprises a VH CDR1, a VH CDR2, and a VH CDR3, and VL CDR1, a VL CDR2, and a VL CDR3, selected from the VH CDR1, a VH CDR2, and a VH CDR3, and VL CDR1, a VL CDR2, and a VL CDR3 sequences disclosed in TABLE 7.

[0865] Some aspects of the disclosure pertains to a bispecific molecule that specifically binds to FIX and FX and then functionally mimics activated factor VIII (FVIIIa) cofactor in at least one FVIIIa activity assay. In some aspects, the FVIIIa activity assay is selected from a chromogenic FXa generation assay, a one-stage clotting assay, or the combination thereof. A particular aspect of the disclosure includes a bispecific molecule that preferentially binds to FIXa (e.g, FIXa in tenase complex, e.g., FIXa-SM) over free FIXa or FIX zymogen and FX zymogen over FXa (e.g., FXa-SM) and mimics an activated factor VIII cofactor activity.

[0866] In some embodiments, the FVIIIa activity achieves at least about 10%, at least about 15%, at least about 20%, at least about 25%, at least about 30%, at least about 35%, at least about 40%, at least about 45%, at least about 50%, at least about 55%, at least about 60%, at least about 60%, at least about 65%, at least about 70%, at least about 75%, at least about 80%, at least about 85%, at least about 90%, at least about 95%, at least about 100%, at least about 105%, at least about 110%, at least about 115%, at least about 120%, at least about 125%, at least about 130%, at least about 135%, at least about 140%, at least about 145%, at least about 150%, at least about 155%, at least about 160%, at least about 165%, at least about 170%, at least about 175%, at least about 180%, at least about 185%, at least about 190%, at least about 195%, or at least about 200% of the activity otherwise achieved by FVIII in the same assay.

[0867] In further embodiments, the bispecific molecule is capable of generating thrombin from prothrombin, fibrin from fibrinogen, and/or fibrin clot in vitro or in vivo. In some embodiments, the bispecific molecule concurrently binds to both FIXa and FX, as determined by BLI.

[0868] In some aspects, the bispecific molecule comprises an anti-FIX antibody, or antigen binding portion thereof (i.e., an anti-FIXa or an anti-FIXz antibody or antigen binding portion thereof), and an anti-FX antibody, or antigen binding portion thereof (i.e., an anti-FXz or anti-FXa antibody or antigen binding portion thereof), wherein the bispecific molecule shows significant loss of activity in the absence of phospholipids as measured in an FXa generation assay. In some aspects, the bispecific molecule comprises an anti-FIXa antibody or antigen binding protein thereof (i.e., an anti-FIXa or an anti-FIXz antibody or antigen binding portion thereof) and an anti-FX antibody, or antigen binding portion thereof (i.e., an anti-FXz or anti-FXa antibody or antigen binding portion thereof). In some aspects, the absence of phospholipids in the FXa generation assay results in a loss of activity of at least about 10%, at least about 15%, at least about 20%, at least about 25%, at least about 30%, at least about 35%, at least about 40%, at least about 45%, at least about 50%, at least about 55%, at least about 60%, at least about 65%, at least about 70%, at least about 75%, at least about 80%, at least about 85%, at least about 90%, at least about 95%, or about 100%, with respect to the activity measured in the presence of phospholipids. In some aspects, the bispecific molecule shows minimal phospholipid-independent activity compared to the phospholipid-independent activity of a reference bispecific antibody disclosed in U.S. Pat. No. 8,062,635 (e.g., emicizumab, ACE910), which is incorporated herein by reference in its entirety. In some aspects, the bispecific molecule disclosed herein shows less than about 20%, less than about 15%, less than about 10%, or less than about 5% of the activity observed for a reference bispecific antibody disclosed in U.S. Pat. No. 8,062,635 (e.g., emicizumab, ACE910) in an FXa generation assay in the absence of phospholipids.

[0869] In some aspect, the bispecific molecule disclosed herein has higher activity in a thrombin generation assay triggered with factor XIa when the synthetic phospholipid vesicles tested are composed of PS (phosphatidylserine)/PE (phosphatidylethanolamine)/PC(phosphatidylcholine) (20%/40%/40%) than when the synthetic phospholipid vesicles tested are composed of PS/PC (20%/80%). In some aspects, the activity of the bispecific molecule disclosed herein in a thrombin generation assay triggered with factor XIa in the presence of PE-containing phospholipid vesicles (e.g, PS/PE/PC 20%/40%/40%) is at least about 50%, at least about 60%, at least about 70%, at least about 80%, at least about 90%, at least about 100%, at least about 110%, at least about 120%, at least about 130%, at least about 140%, at least about 150%, at least about 160%, at least about 170%, at least about 180%, at least about 190%, at least about 200%, at least about 210%, at least about 220%, at least about 230%, at least about 240%, at least about 250%, at least about 260%, at least about 270%, at least about 280%, at least about 290%, or at least about 300% higher than the activity observed under the same experimental conditions in the presence of vesicles lacking PE (e.g., PS/PC 20%/80%).

[0870] In some aspects, the phospholipid concentration that supports peak activity for the bispecific molecule of the present disclosure is higher than the phospholipid concentration that supports peak activity for rFVIII.

[0871] In some aspects, the bispecific molecule is of the IgG isotype. In some aspects, the IgG isotype is of the IgG1 subclass. In some aspects, the IgG isotype is of the IgG4 subclass.

[0872] In some aspects the bispecific molecule is of a bispecific IgG format and is selected from the group consisting of the bispecific antibodies in TABLE 2. In some aspects, the bispecific molecule is of a bispecific heterodimeric format.

[0873] In some aspects, the bispecific molecule comprises two different heavy chains and two different light chains. In some aspects, the bispecific molecule comprises two identical light chains and two different heavy chains.

[0874] In some aspects, the bispecific molecule is capable of controlling or reducing the incidence of bleeding episodes in a subject having hemophilia. In some aspects, the bispecific molecule is capable of maintaining homeostasis or in a subject having hemophilia.

[0875] In some aspects, the bispecific molecule is capable of providing routine prophylaxis in a subject having hemophilia. In some aspects, the subject has developed or is expected to develop neutralizing antibodies against Factor VIII.

[0876] In some aspects, the bispecific molecule disclosed herein (e.g., an antibody) is a (monoclonal) bispecific antibody that has binding specificities for at least two different sites and can be of any format. A wide variety of recombinant antibody formats have been developed in the recent past, e.g. bivalent, trivalent or tetravalent bispecific antibodies. Examples include the fusion of an IgG antibody format and single chain domains (for different formats see e.g. Coloma, M. J., et al, Nature Biotech 15 (1997), 159-163; WO 2001/077342; Morrison, S. L., Nature Biotech 25 (2007), 1233-1234; Holliger. P. et. al, Nature Biotech. 23 (2005), 1 126-1 136; Fischer, N., and Leger, O., Pathobiology 74 (2007), 3-14; Shen, J., et. al, J. Immunol. Methods 318 (2007), 65-74; Wu, C, et al., Nature Biotech. 25 (2007), 1290-1297).

[0877] The bispecific antibody or fragment herein also includes bivalent, trivalent or tetravalent bispecific antibodies produced according to the methods disclosed in WO2009/080251; WO2009/080252; WO 2009/080253; WO2009/080254; WO2010/112193; WO2010/115589; WO2010/136172; WO2010/145792; WO2010/145793 and WO2011/117330, all of which are herein incorporated by reference in their entireties.

[0878] In some aspects, the bispecific molecule, e.g., an antibody, disclosed herein comprises an Fd, scFv, disulfide stabilized scFv, a disulfide linked Fv, a V-NAR domain, an IgNar, an intrabody, an IgG-CH2, a minibody, a F(ab′)₃, a tetrabody, a triabody, a diabody, a single-domain antibody, DVD-Ig, Fcab, mAb², a (scFv)₂, or a scFv-Fc.

[0879] The bispecific antibodies disclosed herein may be bispecific even in cases where there are more than two binding domains (i.e., the antibody is trivalent or multivalent). Bispecific antibodies include, for example, multivalent single chain antibodies, diabodies and triabodies, as well as antibodies having the constant domain structure of full length antibodies to which further antigen-binding domains (e.g., single chain Fv, a VH domain and/or a VL domain, Fab, or (Fab)2) are linked via one or more peptide-linkers. The antibodies can be full length from a single species, or be chimerized or humanized. For an antibody with more than two antigen binding domains, some binding domains may be identical, as long as the protein has binding domains for two different antigens.

[0880] The term “valent” as used within the current application denotes the presence of a specified number of binding domains in an antibody molecule. As such, the terms “bivalent”, “tetravalent”, and “hexavalent” denote the presence of two binding domains, four binding domains, and six binding domains, respectively, in an antibody molecule. The bispecific antibodies disclosed herein are at least “bivalent” and may be “trivalent” or “multivalent” (e.g. “tetravalent” or “hexavalent”). In some aspects, the bispecific antibody according to the invention is bivalent, trivalent or tetravalent.

[0881] Techniques for making multispecific antibodies include, but are not limited to, recombinant co-expression of two immunoglobulin heavy chain-light chain pairs having different specificities (see Milstein and Cuello, Nature 305: 537 (1983)), WO 93/08829, and Traunecker et al, EMBO J. 10: 3655 (1991)), and “knob-in-hole” engineering (see, e.g., U.S. Pat. No. 5,731,168; U.S. Publication No. 2011/0287009). Multi-specific antibodies may also be made by engineering electrostatic steering effects for making antibody Fc-heterodimeric molecules (WO 2009/089004A1); cross-linking two or more antibodies or fragments (see, e.g., U.S. Pat. No. 4,676,980, and Brennan et al, Science, 229: 81 (1985)); using leucine zippers or coiled coils to produce bispecific antibodies (see, e.g., Kostelny et al, J. Immunol, 148(5): 1547-1553 (1992) and WO2011/034605); using a furin cleavable tether between a CL domain and a VH domain in a single VH/VL unit (see, e.g., WO2013/119966 and WO2013/055958); using “diabody” technology for making bispecific antibody fragments (see, e.g., Hollinger et al., Proc. Natl. Acad. Sci. USA, 90:6444-6448 (1993)); using immunoglobulin domain crossover for making bispecific antibodies (see, e.g., WO2009/080251); and using single-chain Fv (sFv) dimers (see, e.g. Gruber et al., J. Immunol., 152:5368 (1994)); and preparing trispecific antibodies as described, e.g., in Tutt et al. J. Immunol. 147: 60 (1991).

[0882] Bispecific binding molecules in the context of the present disclosure may relate to an antibody molecule comprising two antibody-derived binding domains, wherein one binding domain can be a scFv. One of the binding domains consists of variable regions (or parts thereof) of an antibody, antibody fragment or derivate thereof, capable of specifically binding to/interacting with a first target molecule (e.g., FIXa). The second binding domain consists of variable regions (or parts thereof) of an antibody, antibody fragment or derivative thereof, capable of specifically binding to/interacting with a second target molecule (e.g., FXz).

[0883] The two domains/regions in the bispecific antibody molecule are preferably covalently connected to one another. This connection can be effected directly, e.g., domain 1 [specific for a first (human) target molecule, e.g., FIXa]-domain 2 [specific for second (human) target molecule, e.g., FXz] or vice versa. In other aspects, this connection can be effected through an additional polypeptide linker sequence [domain 1]-[linker sequence]-[domain2].

[0884] In the event that a linker is used, this linker is in the context of the present disclosure of a length and sequence sufficient to ensure that each of the first and second domains can, independently from each other, retain their differential binding specificities. In the context of the present disclosure the additional polypeptide linker sequence can also be a fragment of an antibody itself which may be for example the Fc part or one or more constant domains of an antibody.

[0885] In the context of the present disclosure, binding domain 1 can also be part of an antibody arm 1 and binding domain 2 can also be part of an antibody arm 2, or vice versa, wherein the two antibody arms are connected via an interface. The antibody arm 1 consists of variable regions (or parts thereof) of an antibody, antibody fragment or derivate thereof, capable of specifically binding to/interacting with a (human) target molecule 1. The antibody arm 2 consists of variable regions (or parts thereof) of an antibody, antibody fragment or derivative thereof capable of specifically binding to/interacting with a (human) target molecule 2.

[0886] The “interface” comprises those contact amino acid residues (or other non-amino acid groups such as, e.g., carbohydrate groups) in the first antibody arm which interact with one or more “contact” amino acid residues (or other non-amino acid groups) in the interface of the second antibody arm. The preferred interface is a domain of an immunoglobulin such as a constant domain (or regions thereof) of the antibody's heavy chains, wherein the binding/interaction via the interface provides for the heterodimerization of the two antibody arms. See e.g. Ridgway et al. (1996) Protein Eng. 9:617-621; International Publ. No. WO 96/027011; Merchant et al. (1998) Nature Biotech. 16:677-681; Atwell et al. (1997) J. Mol. Biol. 270:26-35; European Patent Application EP1870459A1; and International Publication Nos. WO2007/147901, WO2009/089004 and WO 2010/129304, all of which are herein incorporated by reference in their entireties.

[0887] Bispecific antibody molecule to be employed in accordance with the disclosure can be further modified using conventional techniques known in the art, for example, by using amino acid deletion(s), insertion(s), substitution(s), addition(s), and/or recombination(s) and/or any other modification(s) known in the art either alone or in combination. Methods for introducing such modifications in the DNA sequence underlying the amino acid sequence of an immunoglobulin chain arc well known to the person skilled in the art; see, e.g., Sambrook (1989), loc. cit. Fragments or derivatives of the recited Ig-derived domains define (poly) peptides which are parts of the above antibody molecules and/or which are modified by chemical/biochemical or molecular biological methods. Corresponding methods are known in the art and described inter alia in laboratory manuals (see Sambrook et al., Molecular Cloning: A Laboratory Manual: Cold Spring Harbor Laboratory Press, 2nd edition (1989) and 3rd edition (2001); Gerhardt et al., Methods for General and Molecular Bacteriology ASM Press (1994); Lefkovits, Immunology Methods Manual: The Comprehensive Sourcebook of Techniques; Academic Press (1997); Golemis, Protein-Protein Interactions: A Molecular Cloning Manual Cold Spring Harbor Laboratory Press (2002)).

[0888] The bispecific antibodies disclosed herein can comprise, for example, one or more of the following components:

(i) “Single-chain Fvs” or “scFv”: Antibody fragments that have the VH and VL domains of an antibody, wherein these domains are present in a single polypeptide chain. Generally, the scFv polypeptide further comprises a polypeptide linker between the VH and VL domains which enables the scFv to form the desired structure for antigen binding. Techniques described for the production of single chain antibodies are described, e.g., in Pluckhun in The Pharmacology of Monoclonal Antibodies, Rosenburg and Moore eds. Springer-Verlag, N.Y. 113 (1994), 269-315.
(ii) “Fab fragment”: Comprised of one light chain and the CH1 and variable regions of one heavy chain. The heavy chain of a Fab molecule cannot form a disulfide bond with another heavy chain molecule.
(iii) “Fab′ fragment”: Contains one light chain and a portion of one heavy chain that contains the VH domain and the CH1 domain and also the region between the CH1 and CH2 domains, such that an interchain disulfide bond can be formed between the two heavy chains of two Fab′ fragments to form a F(ab′)₂ molecule.
(iv) “F(ab′)₂ fragment”: Contains two light chains and two heavy chains containing a portion of the constant region between the CH1 and CH2 domains, such that an interchain disulfide bond is formed between the two heavy chains. A F(ab′)₂ fragment thus is composed of two Fab′ fragments that are held together by a disulfide bond between the two heavy chains. The “Fv region” comprises the variable regions from both the heavy and light chains, but lacks the constant regions.

[0889] It is of note that a bispecific antibody disclosed herein may comprise, in addition to the herein defined first (Ig-derived) domain and the (Ig-derived) second domain (an) additional domain(s), e.g. for the isolation and/or preparation of recombinantly produced constructs.

### IV. Constant Region of Antibodies

[0890] An anti-FIX variable region (e.g., anti-FIXa variable region or anti-FIXz variable region) and/or anti-FX variable region (e.g., anti-FXa variable region or anti-FXz variable region) described herein, as monospecific, bispecific, or multispecific molecules, can be linked (e.g., covalently linked or fused) to an Fc, e.g., an IgG1, IgG2, IgG3 or IgG4 Fc, which may be of any allotype or isoallotype, e.g., for IgG1: G1m, G1m1(a), G1m2(x), G1m3(f), G1m17(z); for IgG2: G2m, G2m23(n); for IgG3: G3m, G3m21(g1), G3m28(g5), G3m11(b0), G3m5(b1), G3m13(b3), G3m14(b4), G3m10(b5), G3m15(s), G3m16(t), G3m6(c3), G3m24(c5), G3m26(u), G3m27(v); and for K: Km, Km1, Km2, Km3 (see, e.g., Jefferies et al. (2009) mAbs 1: 1).

[0891] In certain embodiments, anti-FIX or anti-FX variable regions described herein are linked to an Fc that binds to one or more activating Fc receptors (FcγI, FcγIIa or FcγIIIa), and thereby stimulate ADCC. In certain embodiments, anti-FIX or anti-FX variable regions described herein are linked to an effectorless or mostly effectorless Fc, e.g., IgG2 or IgG4.

[0892] Anti-FIX or anti-FX variable regions described herein can be linked to a non-naturally occurring Fc region, e.g., an effectorless Fc or an Fc with enhanced binding to one or more activating Fc receptors (FcγI, FcγIIa or FcγIIIa).

[0893] Generally, variable regions described herein can be linked to an Fc comprising one or more modification, typically to alter one or more functional properties of the antibody, such as serum half-life, complement fixation, Fc receptor binding, and/or antigen-dependent cellular cytotoxicity. Furthermore, an antibody described herein can be chemically modified (e.g., one or more chemical moieties can be attached to the antibody) or be modified to alter its glycosylation, to alter one or more functional properties of the antibody. Each of these embodiments is described in further detail below. The numbering of residues in the Fc region is that of the EU index of Kabat.

[0894] The Fc region encompasses domains derived from the constant region of an immunoglobulin, preferably a human immunoglobulin, including a fragment, analog, variant, mutant or derivative of the constant region. Suitable immunoglobulins include IgG1, IgG2, IgG3, IgG4, and other classes such as IgA, IgD, IgE and IgM. The constant region of an immunoglobulin is defined as a naturally-occurring or synthetically-produced polypeptide homologous to the immunoglobulin C-terminal region, and can include a CH1 domain, a hinge, a CH2 domain, a CH3 domain, or a CH4 domain, separately or in combination.

[0895] The constant region of an immunoglobulin is responsible for many important antibody functions including Fc receptor (FcR) binding and complement fixation. There are five major classes of heavy chain constant region, classified as IgA, IgG, IgD, IgE, IgM, each with characteristic effector functions designated by isotype. For example, IgG is separated into four subclasses known as IgG1, IgG2, IgG3, and IgG4. Ig molecules interact with multiple classes of cellular receptors. For example IgG molecules interact with three classes of Fcγ receptors (FcγR) specific for the IgG class of antibody, namely FcγRI, FcγRII, and FcγRIII The important sequences for the binding of IgG to the FcγR receptors have been reported to be located in the CH2 and CH3 domains. The serum half-life of an antibody is influenced by the ability of that antibody to bind to an Fc receptor (FcR).

[0896] In certain embodiments, the Fc region is a variant Fc region, e.g., an Fc sequence that has been modified (e.g., by amino acid substitution, deletion and/or insertion) relative to a parent Fc sequence (e.g., an unmodified Fc polypeptide that is subsequently modified to generate a variant), to provide desirable structural features and/or biological activity,

[0897] For example, one may make modifications in the Fc region in order to generate an Fc variant that (a) has increased or decreased antibody-dependent cell-mediated cytotoxicity (ADCC), (b) increased or decreased complement mediated cytotoxicity (CDC), (c) has increased or decreased affinity for C1q and/or (d) has increased or decreased affinity for a Fc receptor relative to the parent Fc. Such Fc region variants will generally comprise at least one amino acid modification in the Fc region. Combining amino acid modifications is thought to be particularly desirable. For example, the variant Fc region may include two, three, four, five, etc substitutions therein, e.g., of the specific Fc region positions identified herein.

[0898] A variant Fc region may also comprise a sequence alteration wherein amino acids involved in disulfide bond formation are removed or replaced with other amino acids. Such removal may avoid reaction with other cysteine-containing proteins present in the host cell used to produce the antibodies described herein. Even when cysteine residues are removed, single chain Fc domains can still form a dimeric Fc domain that is held together non-covalently. In other embodiments, the Fc region may be modified to make it more compatible with a selected host cell. For example, one may remove the PA sequence near the N-terminus of a typical native Fc region, which may be recognized by a digestive enzyme in E. coli such as proline iminopeptidase. In other embodiments, one or more glycosylation sites within the Fc domain may be removed. Residues that are typically glycosylated (e.g., asparagine) may confer cytolytic response. Such residues may be deleted or substituted with unglycosylated residues (e.g., alanine). In other embodiments, sites involved in interaction with complement, such as the C1q binding site, may be removed from the Fc region. For example, one may delete or substitute the EKK sequence of human IgG1. In certain embodiments, sites that affect binding to Fc receptors may be removed, preferably sites other than salvage receptor binding sites. In other embodiments, an Fc region may be modified to remove an ADCC site. ADCC sites are known in the art; see, for example, Molec. Immunol. 29 (5): 633-9 (1992) with regard to ADCC sites in IgG1. Specific examples of variant Fc domains are disclosed for example, in WO 97/34631 and WO 96/32478.

[0899] In one embodiment, the hinge region of Fc is modified such that the number of cysteine residues in the hinge region is altered, e.g., increased or decreased. This approach is described further in U.S. Pat. No. 5,677,425 by Bodmer et al. The number of cysteine residues in the hinge region of Fc is altered to, for example, facilitate assembly of the light and heavy chains or to increase or decrease the stability of the antibody. In one embodiment, the Fc hinge region of an antibody is mutated to decrease the biological half-life of the antibody. More specifically, one or more amino acid mutations are introduced into the CH2-CH3 domain interface region of the Fc-hinge fragment such that the antibody has impaired Staphylococcal protein A (SpA) binding relative to native Fc-hinge domain SpA binding. This approach is described in further detail in U.S. Pat. No. 6,165,745 by Ward et al.

[0900] In yet other embodiments, the Fc region is altered by replacing at least one amino acid residue with a different amino acid residue to alter the effector function(s) of the antibody. For example, one or more amino acids selected from amino acid residues 234, 235, 236, 237, 297, 318, 320 and 322 can be replaced with a different amino acid residue such that the antibody has an altered affinity for an effector ligand but retains the antigen-binding ability of the parent antibody. The effector ligand to which affinity is altered can be, for example, an Fc receptor or the CI component of complement. This approach is described in further detail in U.S. Pat. Nos. 5,624,821 and 5,648,260, both by Winter et al.

[0901] In another example, one or more amino acids selected from amino acid residues 329, 331 and 322 can be replaced with a different amino acid residue such that the antibody has altered C1q binding and/or reduced or abolished complement dependent cytotoxicity (CDC). This approach is described in further detail in U.S. Pat. No. 6,194,551 by Idusogie et al.

[0902] In another example, one or more amino acid residues within amino acid positions 231 and 239 are altered to thereby alter the ability of the antibody to fix complement. This approach is described further in PCT Publication WO 94/29351 by Bodmer et al.

[0903] In yet another example, the Fc region may be modified to increase antibody dependent cellular cytotoxicity (ADCC) and/or to increase the affinity for an Fcγ receptor by modifying one or more amino acids at the following positions: 234, 235, 236, 238, 239, 240, 241, 243, 244, 245, 247, 248, 249, 252, 254, 255, 256, 258, 262, 263, 264, 265, 267, 268, 269, 270, 272, 276, 278, 280, 283, 285, 286, 289, 290, 292, 293, 294, 295, 296, 298, 299, 301, 303, 305, 307, 309, 312, 313, 315, 320, 322, 324, 325, 326, 327, 329, 330, 331, 332, 333, 334, 335, 337, 338, 340, 360, 373, 376, 378, 382, 388, 389, 398, 414, 416, 419, 430, 433, 434, 435, 436, 437, 438 or 439. Exemplary substitutions include 236A, 239D, 239E, 268D, 267E, 268E, 268F, 324T, 332D, and 332E. Exemplary variants include 239D/332E, 236A/332E, 236A/239D/332E, 268F/324T, 267E/268F, 267E/324T, and 267E/268F7324T. Other modifications for enhancing FcγR and complement interactions include but are not. limited to substitutions 298 A, 333A, 334A, 326A, 2471, 339D, 339Q, 280H, 290S, 298D, 298V, 243L, 292P, 300L, 396L, 3051, and 396L. These and other modifications are reviewed in Strohl, 2009, Current Opinion in Biotechnology 20:685-691.

[0904] Fc modifications that increase binding to an Fcγ receptor include amino acid modifications at any one or more of amino acid positions 238, 239, 248, 249, 252, 254, 255, 256, 258, 265, 267, 268, 269, 270, 272, 279, 280, 283, 285, 298, 289, 290, 292, 293, 294, 295, 296, 298, 301, 303, 305, 307, 312, 315, 324, 327, 329, 330, 335, 337, 3338, 340, 360, 373, 376, 379, 382, 388, 389, 398, 414, 416, 419, 430, 434, 435, 437, 438 or 439 of the Fc region, wherein the numbering of the residues in the Fc region is that of the EU index as in Kabat (WO00/42072).

[0905] Other Fc modifications that can be made to Fes are those for reducing or ablating binding to FcγR and/or complement proteins, thereby reducing or ablating Fc-mediated effector functions such as ADCC, ADCP, and CDC. Exemplary modifications include but are not limited substitutions, insertions, and deletions at positions 234, 235, 236, 237, 267, 269, 325, and 328, wherein numbering is according to the EU index. Exemplary substitutions include but are not limited to 234G, 235G, 236R, 237K, 267R, 269R, 325L, and 328R, wherein numbering is according to the EU index. An Fc variant may comprise 236R/328R. Other modifications for reducing FcγR and complement interactions include substitutions 297A, 234A, 235A, 237A, 318A, 228P, 236E, 268Q, 309L, 330S, 331 S, 220S, 226S, 229S, 238S, 233P, and 234V, as well as removal of the glycosylation at position 297 by mutational or enzymatic means or by production in organisms such as bacteria that do not glycosylate proteins. These and other modifications are reviewed in Strohl, 2009, Current Opinion in Biotechnology 20:685-691.

[0906] Optionally, the Fc region may comprise a non-naturally occurring amino acid residue at additional and/or alternative positions known to one skilled in the art (see, e.g., U.S. Pat. Nos. 5,624,821; 6,277,375; 6,737,056; 6,194,551; 7,317,091; 8,101,720; PCX Patent Publications WO 00/42072; WO 01/58957; WO 02/06919; WO 04/016750; WO 04/029207; WO 04/035752; WO 04/074455; WO 04/099249; WO 04/063351; WO 05/070963; WO 05/040217, WO 05/092925 and WO 06/020114).

[0907] Fc variants that enhance affinity for an inhibitory receptor FcγRIIb may also be used. Such variants may provide an Fc fusion protein with immuno-modulatory activities related to FcγRIIb⁺ cells, including for example B cells and monocytes. In one embodiment, the Fc variants provide selectively enhanced affinity to FcγRIIb relative to one or more activating receptors. Modifications for altering binding to FcγRIIb include one or more modifications at a position selected from the group consisting of 234, 235, 236, 237, 239, 266, 267, 268, 325, 326, 327, 328, and 332, according to the EU index. Exemplary substitutions for enhancing FcγRIIb affinity include but are not limited to 234D, 234E, 234F, 234W, 235D, 235F, 235R, 235Y, 236D, 236N, 237D, 237N, 239D, 239E, 266M, 267D, 267E, 268D, 268E, 327D, 327E, 328F, 328W, 328Y, and 332E. Exemplary substitutions include 235Y, 236D, 239D, 266M, 267E, 268D, 268E, 328F, 328W, and 328Y. Other Fc variants for enhancing binding to FcγRIIb include 235Y/267E, 236D/267E, 239D/268D, 239D/267E, 267E/268D, 267E/268E, and 267E/328F.

[0908] The affinities and binding properties of an Fc region for its ligand may be determined by a variety of in vitro assay methods (biochemical or immunological based assays) known in the art including but not limited to, equilibrium methods (e.g., enzyme-linked immunoabsorbent assay (ELISA), or radioimmunoassay (RIA)), or kinetics (e.g., BIACORE analysis), and other methods such as indirect binding assays, competitive inhibition assays, fluorescence resonance energy transfer (FRET), gel electrophoresis and chromatography (e.g., gel filtration). These and other methods may utilize a label on one or more of the components being examined and/or employ a variety of detection methods including but not limited to chromogenic, fluorescent, luminescent, or isotopic labels. A detailed description of binding affinities and kinetics can be found in Paul, W. E., ed., Fundamental immunology, 4th Ed., Lippincott-Raven, Philadelphia (1999), which focuses on antibody-immunogen interactions.

[0909] In certain embodiments, the antibody is modified to increase its biological half-life. Various approaches are possible. For example, this may be done by increasing the binding affinity of the Fc region for FcRn, For example, one or more of more of following residues can be mutated: 252, 254, 256, 433, 435, 436, as described in U.S. Pat. No. 6,277,375. Specific exemplary substitutions include one or more of the following: T252L, T254S, and/or T256F. Alternatively, to increase the biological half-life, the antibody can be altered within the CH1 or CL region to contain a salvage receptor binding epitope taken from two loops of a CH2 domain of an Fc region of an IgG, as described in U.S. Pat. Nos. 5,869,046 and 6,121,022 by Presta et al. Other exemplary variants that increase binding to FcRn and/or improve pharmacokinetic properties include substitutions at positions 259, 308, 428, and 434, including for example 2591, 308F, 428L, 428M, 434S, 4341 1. 434F, 434Y, and 434X1. Other variants that increase Fc binding to FcRn include: 250E, 250Q, 428 L, 428F, 250Q/428L (Hinton et al, 2004, J. Biol. Chem. 279(8): 6213-6216, Hinton et al. 2006 Journal of Immunology 176:346-356), 256A, 272A, 286A, 305A, 307A, 307Q, 31 IA, 312A, 376A, 378Q, 380A, 382A, 434A (Shields et al, Journal of Biological Chemistry, 2001, 276(9):6591-6604), 252F, 252T, 252Y, 252W, 254T, 256S, 256R, 256Q, 256E, 256D, 256T, 309P, 31 1 S, 433R, 433S, 4331, 433P, 433Q, 434H, 434F, 434Y, 252Y/254T/256E, 433K/434F/436H, 308T/309P/31IS (Dall'Acqua et al. Journal of Immunology, 2002, 169:5171-5180, Dall'Acqua et al., 2006, Journal of Biological Chemistry 281:23514-23524). Other modifications for modulating FcRn binding are described in Yeung et al., 2010, J Immunol, 182:7663-7671. In certain embodiments, hybrid IgG isotypes with particular biological characteristics may be used. For example, an IgG1/IgG3 hybrid variant may be constructed by substituting IgG ! positions in the CH2 and/or CH3 region with the amino acids from IgG3 at positions where the two isotypes differ. Thus a hybrid variant IgG antibody may be constructed that comprises one or more substitutions, e.g., 274Q, 276K, 300F, 339T, 356E, 358M, 384S, 392N, 397M, 4221, 435R, and 436F. In other embodiments described herein, an IgG1/IgG2 hybrid variant may be constructed by substituting IgG2 positions in the CH2 and/or CH3 region with amino acids from IgG1 at positions where the two isotypes differ. Tus a hybrid variant IgG antibody may be constructed chat comprises one or more substitutions, e.g., one or more of the following amino acid substitutions: 233E, 234L, 235L, -236G (referring to an insertion of a glycine at position 236), and 321 h.

[0910] Moreover, the binding sites on human IgG1 for FcγRI, FcγRII, FcγRIII and FcRn have been mapped and variants with improved binding have been described (see Shields, R. L. et al. (2001) J. Biol. Chem. 276:6591-6604). Specific mutations at positions 256, 290, 298, 333, 334 and 339 were shown to improve binding to FcγRIII. Additionally, the following combination mutants were shown to improve FcγRIII binding: T256A/S298A, S298A/E333A,

[0911] S298A/K224A and S298A/E333A/K334A, which has been shown to exhibit enhanced FcγRIIIa binding and ADCC activity (Shields et al., 2001). Other IgG1 variants with strongly enhanced binding to FcγRIIIa have been identified, including variants with S239D/I332E and

[0912] S239D/I332E/A330L mutations which showed the greatest increase in affinity for FcγRIIIa, a decrease in FcγRIIb binding, and strong cytotoxic activity in cynomolgus monkeys (Lazar et al., 2006). Introduction of the triple mutations into antibodies such as alemtuzumab (CD52-specific), trastuzumab (HER2/neu-specific), rituximab (CD20-specific), and cetuximab (EGFR-specific) translated into greatly enhanced ADCC activity in vitro, and the S239D/I332E variant showed an enhanced capacity to deplete B cells in monkeys (Lazar et al., 2006). In addition, IgG1 mutants containing L235V, F243L, R292P, Y300L and P396L mutations which exhibited enhanced binding to FcγRIIIa and concomitantly enhanced ADCC activity in transgenic mice expressing human FcγRIIIa in models of B cell malignancies and breast cancer have been identified (Stavenhagen et al., 2007; Nordstrom et al., 2011). Other Fc mutants that may be used include: S298A/E333A/L334A, S239D/I332E, S239D/I332E/A330L, L235V/F243L/R292P/Y300L/P396L, and M428L/N434S.

[0913] In certain embodiments, an Fc is chosen that has reduced binding to FcγRs. An exemplary Fc, e.g., IgG1 Fc, with reduced FcγR binding comprises the following three amino acid substitutions: L234A, L235E and G237A.

[0914] In certain embodiments, an Fc is chosen that has reduced complement fixation. An exemplary Fc, e.g., IgG1 Fc, with reduced complement fixation has the following two amino acid substitutions: A330S and P331S.

[0915] In certain embodiments, an Fc is chosen that has essentially no effector function, i.e., it has reduced binding to FcγRs and reduced complement fixation. An exemplary Fc, e.g., IgG1 Fc, that is effectorless comprises the following five mutations: L234A, L235E, G237A, A330S and P331S.

[0916] When using an IgG4 constant domain, it is usually preferable to include the substitution S228P, which mimics the hinge sequence in IgG1 and thereby stabilizes IgG4 molecules.

[0917] It will be noted that in certain aspects, the binding molecules disclosed herein can be engineered to fuse the CH3 domain directly to the hinge region of the respective modified antibodies or fragments thereof. In other constructs, a peptide spacer can be inserted between the hinge region and the modified CH2 and/or CH3 domains. For example, compatible constructs can be expressed wherein the CH2 domain has been deleted and the remaining CH3 domain (modified or unmodified) is joined to the hinge region with a 5-20 amino acid spacer. Such a spacer can be added, for instance, to ensure that the regulatory elements of the constant domain remain free and accessible or that the hinge region remains flexible. However, it should be noted that amino acid spacers can, in some cases, prove to be immunogenic and elicit an unwanted immune response against the construct. Accordingly, in certain aspects, any spacer added to the construct will be relatively non-immunogenic, or even omitted altogether, so as to maintain the desired biochemical qualities of the modified antibodies.

[0918] Besides the deletion of whole constant region domains, it will be appreciated that the binding molecules disclosed herein can be provided by the partial deletion or substitution of a few or even a single amino acid. For example, the mutation of a single amino acid in selected areas of the CH2 domain can be enough to substantially reduce Fc binding and thereby increase tumor localization. Moreover, as alluded to above, the constant regions of the disclosed binding molecules can be modified through the mutation or substitution of one or more amino acids that enhances the profile of the resulting construct. In this respect it is possible to disrupt the activity provided by a conserved binding site (e.g., Fc binding) while substantially maintaining the configuration and immunogenic profile of the modified antibody or antigen-binding fragment thereof. Certain aspects can comprise the addition of one or more amino acids to the constant region to enhance desirable characteristics such as decreasing effector function or provide for more therapeutic or diagnostic agent attachment. In such aspects, specific sequences derived from selected constant region domains can be inserted or replicated.

[0919] In still another embodiment, the glycosylation of an antibody is modified. For example, an aglycoslated antibody can be made (i.e., the antibody lacks glycosylation). Glycosylation can be altered to, for example, increase the affinity of the antibody for antigen. Such carbohydrate modifications can be accomplished by, for example, altering one or more sites of glycosylation within the antibody sequence. For example, one or more amino acid substitutions can be made that result in elimination of one or more variable region framework glycosylation sites to thereby eliminate glycosylation at that site. Such aglycosylation may increase the affinity of the antibody for antigen. Such an approach is described in further detail in U.S. Pat. Nos. 5,714,350 and 6,350,861 by Co et al.

[0920] Glycosylation of the constant region on N297 can be prevented by mutating one or more of the amino acids residues (e.g., the glycoslylated amino acid residues or an adjacent amino acids residue) to another residue, e.g., N297A, S298G, T299A, or any combination thereof.

[0921] Additionally or alternatively, an antibody can be made that has an altered type of glycosylation, such as a hypofucosylated antibody having reduced amounts of fucosyl residues or an antibody having increased bisecting GlcNac structures. Such altered glycosylation patterns have been demonstrated to increase the ADCC ability of antibodies. Such carbohydrate modifications can be accomplished by, for example, expressing the antibody in a host cell with altered glycosylation machinery. Cells with altered glycosylation machinery have been described in the art and can be used as host cells in which to express recombinant antibodies described herein to thereby produce an antibody with altered glycosylation. For example, EP 1,176,195 by Hanai et al. describes a cell line with a functionally disrupted FUT8 gene, which encodes a fucosyl transferase, such that antibodies expressed in such a cell line exhibit hypofucosylation. PCT Publication WO 03/035835 by Presta describes a variant CHO cell line, Led 3 cells, with reduced ability to attach fucose to Asn(297)-linked carbohydrates, also resulting in hypofucosylation of antibodies expressed in that host cell (see also Shields, R. L. et al. (2002) J. Biol. Chem. 277:26733-26740). PCT Publication WO 99/54342 by Umana et al. describes cell lines engineered to express glycoprotein-modifying glycosyl transferases (e.g., beta(1,4)-N-acetylglucosaminyltransferase III (GnTIII)) such that antibodies expressed in the engineered cell lines exhibit increased bisecting GlcNac structures which results in increased ADCC activity of the antibodies (see also Umana et al. (1999) Nat. Biotech. 17: 176-180).

[0922] Another modification of the antibodies described herein is pegylation. An antibody can be pegylated to, for example, increase the biological (e.g., serum) half-life of the antibody. To pegylate an antibody, the antibody, or fragment thereof, typically is reacted with polyethylene glycol (PEG), such as a reactive ester or aldehyde derivative of PEG, under conditions in which one or more PEG groups become attached to the antibody or antibody fragment. Preferably, the pegylation is carried out via an acylation reaction or an alkylation reaction with a reactive PEG molecule (or an analogous reactive water-soluble polymer). As used herein, the term “polyethylene glycol” is intended to encompass any of the forms of PEG that have been used to derivatize other proteins, such as mono (CI-CIO) alkoxy- or aryloxy-polyethylene glycol or polyethylene glycol-maleimide. In certain embodiments, the antibody to be pegylated is an aglycosylated antibody. Methods for pegylating proteins are known in the art and can be applied to the antibodies described herein. See for example, EP 0 154 316 by Nishimura et al. and EP 0 401 384 by Ishikawa et al.

### V. Immunoconjugates and Fusion Proteins

[0923] The present disclosure also provides immunoconjugates comprising any of the binding molecules (e.g., antibodies) disclosed herein (e.g., an anti-FIX, anti-FX, or a bispecific anti-FIX/anti-FX antibody disclosed herein). In one aspect, the immunoconjugate comprises an antibody or antigen binding portion disclosed herein linked to an agent. In one particular aspect, the immunoconjugate comprises a bispecific molecule disclosed herein linked to an agent (e.g., as therapeutic agent or a diagnostic agent).

[0924] Accordingly, the present disclosure provides immunoconjugates based on the anti-FIX disclosed herein, based on the anti-FX disclosed herein, or based on the bispecific antibodies disclosed herein, e.g., bispecific antibodies comprising an anti-FIX specificity and an anti-FX specificity.

[0925] In some aspects, the immunoconjugate comprises any of the binding molecules disclosed herein (e.g., an anti-FIX, anti-FX, or a bispecific anti-FIX/anti-FX antibody disclosed herein) conjugated to at least one therapeutic or diagnostic agent. In some aspects, the immunoconjugate further comprises at least one optional spacer which can be intercalated between the side chain or an amino acid in a polypeptide chain of a binding molecule disclosed herein (e.g., an anti-FIX, anti-FX, or a bispecific anti-FIX/anti-FX antibody disclosed herein), and the therapeutic or diagnostic moiety. In some aspects, the at least one spacer is a peptide spacer, In other aspects, the at one spacer is a non-peptidic spacer. In some aspects, the spacer is unstable, such as an acid labile spacer (e.g., a hydrazine). In other aspects, the spacer is an enzyme cleavable peptide, e.g., a cleavable dipeptide. In some aspects, the spacer is uncleavable (hydrolytically stable), for example, a thioether spacer or a hindered disulfide spacer.

[0926] In some aspects, the immunoconjugate comprises two, three, four, five, six, seven, eight, nine or ten therapeutic or diagnostic moieties. In some aspects, all therapeutic or diagnostic moieties are the same. In some aspects, at least one therapeutic or diagnostic moiety is different from the rest. In some aspects, all therapeutic or diagnostic moieties are different. In some aspects, all the spacers (e.g., peptidic and/or non-peptidic spacers) are the same. In some aspects, at least one spacer is different from the rest. In still other aspects, all the spacers are different.

[0927] In some aspects, each therapeutic or diagnostic moiety is chemically conjugated to the side chain of an amino acid at a specific position in the Fc region of a binding molecule disclosed herein (e.g., an anti-FIX, anti-FX, or a bispecific anti-FIX/anti-FX antibody disclosed herein).

[0928] In some aspects, the specific positions in the Fc region are selected from the group consisting of 239, 248, 254, 258, 273, 279, 282, 284, 286, 287, 289, 297, 298, 312, 324, 326, 330, 335, 337, 339, 350, 355, 356, 359, 360, 361, 375, 383, 384, 389, 398, 400, 413, 415, 418, 422, 435, 440, 441, 442, 443, 446, an insertion between positions 239 and 240, and combinations thereof, wherein the amino acid position numbering is according to the EU index as set forth in Kabat.

[0929] In some aspects, the amino acid side chain where the therapeutic or diagnostic moiety is conjugated is a sulfhydryl side chain, for example, the sulfhydryl group of a cysteine amino acid. In some aspects, at least one therapeutic or diagnostic moiety is chemically conjugated to the side chain of an amino acid located at a position outside of the Fc region of a binding molecule disclosed herein (e.g., an anti-FIX, anti-FX, or a bispecific anti-FIX/anti-FX antibody disclosed herein).

[0930] In some aspects, all the therapeutic or diagnostic moieties are chemically conjugated to the side chain of an amino acid located at a position outside of the Fc region of a binding molecule disclosed herein (e.g., an anti-FIX, anti-FX, or a bispecific anti-FIX/anti-FX antibody disclosed herein). In some aspects, at least one therapeutic or diagnostic moiety is genetically incorporated into the polypeptide chain of a binding molecule disclosed herein (e.g., an anti-FIX, anti-FX, or a bispecific anti-FIX/anti-FX antibody disclosed herein) using recombinant techniques known in the art.

[0931] In some embodiments, the immunoconjugates disclosed herein can comprise a moiety that targets the antibodies or binding molecules disclosed herein to the site of injury. In a particular embodiment, the moiety that targets the antibodies or binding molecules to the site of injury comprises a platelet targeting moiety, e.g., a platelet targeting moiety.

[0932] Immunoconjugates disclosed herein comprise at least one of the binding molecules disclosed herein (e.g., an anti-FIX, anti-FX, or a bispecific anti-FIX/anti-FX antibody disclosed herein) which has been derivatized or linked (e.g., chemically or recombinantly) to another molecule (e.g., a peptide, small drug molecule, detectable molecule, etc.). In general, binding molecules disclosed herein (e.g., an anti-FIX, anti-FX, or a bispecific anti-FIX/anti-FX antibody disclosed herein) are derivatized such that their binding to a specific antigen binding site (e.g., an epitope on FIXa and/or an epitope on FXz) is not affected adversely, e.g., by the chemical or enzymatic derivatization, genetic fusion, or labeling.

[0933] Accordingly, the binding molecules of the present disclosure are intended to include both intact and modified forms of the binding molecules disclosed herein (e.g., an anti-FIX, anti-FX, or a bispecific anti-FIX/anti-FX antibody disclosed herein). For example, a binding molecules disclosed herein (e.g., an anti-FIX, anti-FX, or a bispecific anti-FIX/anti-FX antibody disclosed herein) or antigen binding portion thereof can be functionally linked (by chemical coupling, genetic fusion, noncovalent association, or otherwise) to one or more other molecular entities, such as a pharmaceutical agent, a detection agent, and/or a protein or peptide that can mediate association of a binding molecule disclosed herein (e.g., an anti-FIX, anti-FX, or a bispecific anti-FIX/anti-FX antibody disclosed herein) with another molecule (such as a streptavidin core region or a polyhistidine tag).

[0934] One type of derivatized molecule can be produced by crosslinking two or more molecular entities, e.g., a binding molecule disclosed herein (e.g., an anti-FIX, anti-FX, or a bispecific anti-FIX/anti-FX antibody disclosed herein) and a therapeutic moiety. Suitable crosslinkers include those that are heterobifunctional, i.e., having two distinctly reactive groups separated by an appropriate spacer (e.g., m-maleimidobenzoyl-N-hydroxysuccinimidc ester); or homobifunctional (e.g., disuccinimidyl suberate). Such crosslinkers are available, for example, from Pierce Chemical Company, Rockford, II. Additional bifunctional coupling agents include N-succinimidyl-3-(2-pyridyldithiol) propionate (SPDP), succinimidyl-4-(N-maleimidomethyl) cyclohexane-1-carboxylate, iminothiolane (IT), bifunctional derivatives of imidoesters (such as dimethyl adipimidate HCL), active esters (such as disuccinimidyl suberate), aldehydes (such as glutaraldehyde), bis-azido compounds (such as bis (p-azidobenzoyl) hexanediamine), bis-diazonium derivatives (such as bis-(p-diazoniumbenzoyl)-ethylenediamine), diisocyanates (such as tolyene 2,6-diisocyanate), and bis-active fluorine compounds (such as 1,5-difluoro-2,4-dinitrobenzene).

[0935] Another type of derivatized molecule can be produced by incorporating a detectable label. Useful detection agents include fluorescent compounds (e.g., fluorescein, fluorescein isothiocyanate, rhodamine, 5-dimethylamine-l-napthalenesulfonyl chloride, phycoerythrin, lanthanide phosphors and the like), enzymes that are useful for detection (e.g., horseradish peroxidase, β-galactosidase, luciferase, alkaline phosphatase, glucose oxidase and the like), epitopes recognized by a secondary reporter (e.g., leucine zipper pair sequences, binding sites for secondary antibodies, metal binding domains, epitope tags, etc.). In some aspects, detectable labels can be attached by at least one spacer arm. Spacer arms can be of various lengths to reduce potential steric hindrance.

[0936] A binding molecule disclosed herein (e.g., an anti-FIX, anti-FX, or a bispecific anti-FIX/anti-FX antibody) can also be labeled with a radiolabeled, for example, for diagnostic purposes. A binding molecule disclosed herein can also be derivatized with a chemical group, for example a polymer such as polyethylene glycol (PEG), a methyl group, an ethyl group, or a carbohydrate group. These groups can be useful to improve the biological characteristics of the binding molecule (e.g., an anti-FIX, anti-FX, or a bispecific anti-FIX/anti-FX antibody disclosed herein) such as increasing blood serum half-life or to increase tissue binding.

### VI. Nucleic Acids, Expression Vectors, and Cells

[0937] The present disclosure also provides nucleic acids encoding the binding molecules disclosed herein, e.g., any of the antibodies or binding molecules disclosed herein. In some aspects, the nucleic acid encodes the heavy and/or light chain variable region of an antibody disclosed herein, or antigen binding portion thereof, or a bispecific or multispecific molecule (e.g., an antibody) disclosed herein. The polynucleotides of the instant disclosure can be in the form of RNA or in the form of DNA. DNA includes cDNA, genomic DNA, and synthetic DNA; and can be double-stranded or single-stranded, and if single stranded can be the coding strand or non-coding (anti-sense) strand. In certain aspects the DNA is a cDNA that is used to produce a non-naturally-occurring recombinant antibody. In some aspects, the RNA is an mRNA that can express a binding molecule disclosed here after administration to a subject in need thereof. In some aspects, the expression of the mRNA can be in in vivo. mRNA expression can also be in vitro or ex vivo. In some aspects, an mRNA encoding a binding molecule disclosed herein (e.g., an anti-FIX antibody, an anti-FX antibody, or a bispecific anti-FIX/anti-FX antibody) can be chemically modified, e.g., to include modified internucleoside linkages (e.g., phosphorothioate), or modified bases (e.g., pseudouridine, thiouridine, etc.).

[0938] In certain aspects, the polynucleotides are isolated. In certain aspects, the polynucleotides are substantially pure. In certain aspects the polynucleotides comprise the coding sequence for the mature polypeptide fused in the same reading frame to a polynucleotide (either natural or heterologous) which aids, for example, in expression and secretion of a polypeptide from a host cell (e.g., a leader sequence which functions as a secretory sequence for controlling transport of a polypeptide from the cell). The polypeptide having a leader sequence is a preprotein and can have the leader sequence cleaved by the host cell to form the mature form of the polypeptide. The polynucleotides can also encode for binding molecule proprotein which is the mature protein plus additional amino acid residues, e.g., 5′ amino acid residues. In certain aspects, the polynucleotides are altered to optimize codon usage for a certain host cell.

[0939] In certain aspects the polynucleotides comprise the coding sequence for the mature binding molecule, e.g., a binding molecule disclosed herein (e.g., an anti-FIX antibody, an anti-FX antibody, or a bispecific anti-FIX/anti-FX antibody) or an antigen-binding fragment thereof fused in the same reading frame to a heterologous marker sequence that allows, for example, for purification of the encoded polypeptide.

[0940] For example, the marker sequence can be a hexa-histidine (His6) tag supplied, for example, by a pQE-9 vector to provide for purification of the mature polypeptide fused to the marker in the case of a bacterial host. In other aspects, the marker sequence can be a hemagglutinin (HA) tag derived, for example, from the influenza hemagglutinin protein, when a mammalian host (e.g., COS-7 cells) is used.

[0941] The present disclosure further relates to variants of the described polynucleotides encoding, for example, fragments, analogs, and derivatives of the binding molecules disclosed herein (e.g., anti-FIX antibodies, anti-FX antibodies, or a bispecific anti-FIX/anti-FX antibodies). The polynucleotide variants can contain alterations in the coding regions, non-coding regions, or both. In some aspects the polynucleotide variants contain alterations which produce silent substitutions, additions, or deletions, but do not alter the properties or activities of the encoded polypeptide. In some aspects, nucleotide variants are produced by silent substitutions due to the degeneracy of the genetic code. Polynucleotide variants can be produced for a variety of reasons, e.g., to optimize codon expression for a particular host (change codons in the human mRNA to those preferred by a bacterial host such as E. coli).

[0942] In some aspects a DNA sequence encoding a binding molecule disclosed herein or an antigen-binding fragment thereof can be constructed by chemical synthesis, for example, using an oligonucleotide synthesizer. Such oligonucleotides can be designed based on the amino acid sequence of the desired polypeptide and selecting those codons that are favored in the host cell in which the recombinant polypeptide of interest will be produced. Standard methods can be applied to synthesize an isolated polynucleotide sequence encoding an isolated polypeptide of interest. For example, a complete amino acid sequence can be used to construct a back-translated gene. Further, a DNA oligomer containing a nucleotide sequence coding for the particular isolated polypeptide can be synthesized. For example, several small oligonucleotides coding for portions of the desired polypeptide can be synthesized and then ligated. The individual oligonucleotides typically contain 5′ or 3′ overhangs for complementary assembly.

[0943] Also provided is an expression vector or combination of expression vectors comprising one or more of the nucleic acid molecules disclosed herein. Once assembled (by synthesis, site-directed mutagenesis or another method), the polynucleotide sequences encoding a particular isolated polypeptide of interest will be inserted into an expression vector and operatively linked to an expression control sequence appropriate for expression of the protein in a desired host. Proper assembly can be confirmed, for example, by nucleotide sequencing, restriction mapping, and expression of a biologically active polypeptide in a suitable host. As is well known in the art, in order to obtain high expression levels of a transfected gene in a host, the gene must be operatively linked to transcriptional and translational expression control sequences that are functional in the chosen expression host.

[0944] In certain aspects, recombinant expression vectors are used to amplify and express DNA encoding the binding molecules disclosed herein. Recombinant expression vectors are replicable DNA constructs which have synthetic or cDNA-derived DNA fragments encoding, for example, a polypeptide chain of a binding molecule disclosed herein or an antigen-binding fragment thereof, operatively linked to suitable transcriptional or translational regulatory elements derived from mammalian, microbial, viral or insect genes.

[0945] A transcriptional unit generally comprises an assembly of (1) a genetic element or elements having a regulatory role in gene expression, for example, transcriptional promoters or enhancers, (2) a structural or coding sequence which is transcribed into mRNA and translated into protein, and (3) appropriate transcription and translation initiation and termination sequences, as described in detail below. Such regulatory elements can include an operator sequence to control transcription.

[0946] The ability to replicate in a host, usually conferred by an origin of replication, and a selection gene to facilitate recognition of transformants can additionally be incorporated. DNA regions are operatively linked when they are functionally related to each other. For example, DNA for a signal peptide (secretory leader) is operatively linked to DNA for a polypeptide if it is expressed as a precursor which participates in the secretion of the polypeptide; a promoter is operatively linked to a coding sequence if it controls the transcription of the sequence; or a ribosome binding site is operatively linked to a coding sequence if it is positioned so as to permit translation. Structural elements intended for use in yeast expression systems include a leader sequence enabling extracellular secretion of translated protein by a host cell. Alternatively, where recombinant protein is expressed without a leader or transport sequence, it can include an N-terminal methionine residue. This residue can optionally be subsequently cleaved from the expressed recombinant protein to provide a final product.

[0947] The choice of expression control sequence and expression vector will depend upon the choice of host. A wide variety of expression host/vector combinations can be employed. Useful expression vectors for eukaryotic hosts, include, for example, vectors comprising expression control sequences from SV40, bovine papilloma virus, adenovirus and cytomegalovirus. Useful expression vectors for bacterial hosts include known bacterial plasmids, such as plasmids from E. coli, including pCR 1, pBR322, pMB9 and their derivatives, wider host range plasmids, such as M13 and filamentous single-stranded DNA phages.

[0948] The present disclosure also provides a cell comprising a nucleic acid or nucleic acids disclosed herein, or an expression vector or vectors disclosed herein. In some aspects, the cell has been transformed with an expression vector or vectors disclosed herein. In some aspects, the cell is a host cell for recombinant expression. For example, in some aspects, the host cell is a prokaryotic cell, a eukaryotic cell, a protist cell, an animal cell, a plant cell, a fungal cell, a yeast cell, an Sf9 cell, a mammalian cell, an avian cell, an insect cell, a CHO cell, a HEK cell, or a COS cell. Prokaryotes include gram negative or gram positive organisms, for example E. coli or bacilli. Higher eukaryotic cells include established cell lines of mammalian origin. Cell-free translation systems can also be employed. Appropriate cloning and expression vectors for use with bacterial, fungal, yeast, and mammalian cellular hosts are described by Pouwels et al. (Cloning Vectors: A Laboratory Manual, Elsevier, N.Y., 1985), the relevant disclosure of which is hereby incorporated by reference. Additional information regarding methods of protein production, including antibody production, can be found, e.g., in U.S. Publ. No. 2008/0187954, U.S. Pat. Nos. 6,413,746 and 6,660,501, and Int'l Pat. Publ. No. WO 04009823, each of which is hereby incorporated by reference in its entirety.

[0949] Expression of recombinant proteins in mammalian cells can be performed because such proteins are generally correctly folded, appropriately modified and completely functional. Examples of suitable mammalian host cell lines include HEK-293 and HEK-293T, the COS-7 lines of monkey kidney cells, described by Gluzman (Cell 23:175, 1981), and other cell lines including, for example, L cells, C127, 3T3, Chinese hamster ovary (CHO), NSO, HeLa, and BHK cell lines. Mammalian expression vectors can comprise nontranscribed elements such as an origin of replication, a suitable promoter and enhancer linked to the gene to be expressed, and other 5′ or 3′ flanking nontranscribed sequences, and 5′ or 3′ nontranslated sequences, such as necessary ribosome binding sites, a polyadenylation site, splice donor and acceptor sites, and transcriptional termination sequences. Baculovirus systems for production of heterologous proteins in insect cells are reviewed by Luckow & Summers, BioTechnology 6:47 (1988).

[0950] Binding molecules disclosed herein or antigen-binding fragments thereof, produced by a transformed host can be purified according to any suitable method. Such standard methods include, for example, chromatography (e.g., ion exchange, affinity and sizing column chromatography), centrifugation, differential solubility, or by any other standard technique for protein purification. Affinity tags such as hexahistidine, maltose binding domain, influenza coat sequence, glutathione-S-transferase, etc., can be attached to the protein to allow easy purification by passage over an appropriate affinity column. Isolated proteins can also be physically characterized using, for example, proteolysis, nuclear magnetic resonance or x-ray crystallography.

[0951] For example, supernatants from systems which secrete recombinant protein into culture media can be first concentrated using a commercially available protein concentration filter, for example, an AMICON® or Millipore PELLICON® ultrafiltration unit. Following the concentration step, the concentrate can be applied to a suitable purification matrix. Alternatively, an anion exchange resin can be employed, for example, a matrix or substrate having pendant diethylaminoethyl (DEAE) groups. The matrices can be acrylamide, agarose, dextran, cellulose or other types commonly employed in protein purification. Alternatively, a cation exchange step can be employed.

[0952] Suitable cation exchangers include various insoluble matrices comprising sulfopropyl or carboxymethyl groups. Finally, one or more reversed-phase high performance liquid chromatography (RP-HPLC) steps employing hydrophobic RP-HPLC media, e.g., silica gel having pendant methyl or other aliphatic groups, can be employed to further purify a binding molecule disclosed herein or an antigen binding portion thereof. Some or all of the foregoing purification steps, in various combinations, can also be employed to provide a homogeneous recombinant protein.

[0953] A recombinant binding molecule disclosed herein or antigen binding portion thereof produced in bacterial culture can be isolated, for example, by initial extraction from cell pellets, followed by one or more concentration, salting-out, aqueous ion exchange or size exclusion chromatography steps. High performance liquid chromatography (HPLC) can be employed for final purification steps. Microbial cells employed in expression of a recombinant protein can be disrupted by any convenient method, including freeze-thaw cycling, sonication, mechanical disruption, or use of cell lysing agents.

[0954] Methods known in the art for purifying antibodies and other proteins also include, for example, those described in U.S. Pat. Publ. Nos. US20080312425, US20080177048, and US20090187005, each of which is hereby incorporated by reference in its entirety.

### VII. Methods of Making and Characterization

[0955] The present disclosure also provides methods of preparing the binding molecules disclosed herein, e.g., antibodies. In some aspects, the method of producing (i) an anti-FIX antibody, or antigen binding portion thereof, (ii) an anti-FX antibody, or antigen binding portion thereof, or (iii) a bispecific molecule disclosed herein comprises expressing the antibody antigen binding portion thereof or bispecific molecule in a cell (e.g., a host cell) and isolating the antibody, antigen binding portion thereof, or bispecific molecule from the cell.

[0956] The disclosure provides a method of producing a bispecific molecule, comprising culturing a host cell disclosed herein under conditions that allow the expression of the bispecific molecule. Also provides is a method of producing a bispecific molecule disclosed herein further comprising conditions that enhance heterodimerization.

[0957] Binding molecules disclosed herein (e.g., anti-FIX antibodies, anti-FX antibodies, or bispecific anti-FIX/anti-FX antibodies) can be prepared according to methods known in the art. For example, binding molecules disclosed herein (e.g., anti-FIX antibodies, anti-FX antibodies, or bispecific anti-FIX/anti-FX antibodies) can be generated using hybridoma methods, such as those described by Kohler & Milstein (1975) Nature 256:495.

[0958] Using the hybridoma method, a mouse, hamster, or other appropriate host animal, is immunized as described above to elicit the production by lymphocytes of antibodies that will specifically bind to an immunizing antigen. Lymphocytes can also be immunized in vitro. Following immunization, the lymphocytes are isolated and fused with a suitable myeloma cell line using, for example, polyethylene glycol, to form hybridoma cells that can then be selected away from unfused lymphocytes and myeloma cells. Hybridomas that produce monoclonal antibodies directed specifically against a chosen antigen as determined by immunoprecipitation, immunoblotting, or by an in vitro binding assay (e.g. radioimmunoassay (RIA); enzyme-linked immunosorbent assay (ELISA)) can then be propagated either in in vitro culture using standard methods (Goding, Monoclonal Antibodies: Principles and Practice, Academic Press, 1986) or in vivo as ascites tumors in an animal. The monoclonal antibodies can then be purified from the culture medium or ascites fluid as described for polyclonal antibodies above.

[0959] Binding molecules disclosed herein (e.g., anti-FIX antibodies, anti-FX antibodies, or bispecific anti-FIX/anti-FX antibodies) can also be made using recombinant DNA methods as described in U.S. Pat. No. 4,816,567. The polynucleotides encoding a monoclonal antibody are isolated from mature B-cells or hybridoma cell, such as by RT-PCR using oligonucleotide primers that specifically amplify the genes encoding the heavy and light chains of the antibody, and their sequence is determined using conventional procedures. The isolated polynucleotides encoding the heavy and light chains are then cloned into suitable expression vectors, which when transfected into host cells such as E. coli cells, simian COS cells, Chinese hamster ovary (CHO) cells, or myeloma cells that do not otherwise produce immunoglobulin protein, monoclonal antibodies are generated by the host cells.

[0960] Also, recombinant monoclonal antibodies or molecules comprising antigen-binding fragments thereof of the desired species can be isolated from phage display libraries expressing CDRs of the desired species as described (McCafferty et al., Nature 348:552-554 (1990); Clarkson et al., Nature 352:624-628 (1991); and Marks et al., J. Mol. Biol. 222:581-597 (1991)).

[0961] The polynucleotide(s) encoding binding molecules disclosed herein (e.g., anti-FIX antibodies, anti-FX antibodies, or bispecific anti-FIX/anti-FX antibodies) can further be modified in a number of different manners using recombinant DNA technology to generate alternative binding molecules. In some aspects, the constant domains of the light and heavy chains of, for example, a mouse monoclonal antibody can be substituted (1) for those regions of, for example, a human antibody to generate a chimeric antibody or (2) for a non-immunoglobulin polypeptide to generate a fusion antibody. In some aspects, the constant regions are truncated or removed to generate the desired antibody fragment of a monoclonal antibody. Site-directed or high-density mutagenesis of the variable region can be used to optimize specificity, affinity, etc. of a monoclonal antibody.

[0962] In certain aspects, a binding molecule disclosed herein (e.g., an anti-FIX antibody, anti-FX antibody, or bispecific anti-FIX/anti-FX antibody) is a human antibody or antigen-binding fragment thereof. Human antibodies can be directly prepared using various techniques known in the art. Immortalized human B lymphocytes immunized in vitro or isolated from an immunized individual that produce an antibody directed against a target antigen can be generated (See, e.g., Cole et al., Monoclonal Antibodies and Cancer Therapy, Alan R. Liss, p. 77 (1985); Boemer et al., J. Immunol. 147:86-95 (1991); and U.S. Pat. No. 5,750,373). One or more cDNAs encoding the antibody in the immortalized B lymphocyte can then be prepared and inserted into an expression vector and/or a heterologous host cell for expression of a non-naturally-occurring recombinant version of the antibody.

[0963] Also, a binding molecule disclosed herein (e.g., an anti-FIX antibody, anti-FX antibody, or bispecific anti-FIX/anti-FX antibody) can be selected from a phage library, where that phage library expresses human antibodies or fragments thereof as fusion proteins with heterologous phage proteins, as described, for example, in Vaughan et al., Nat. Biotech. 14:309-314 (1996); Sheets et al., Proc. Natl. Acad. Sci. 95:6157-6162 (1998); Hoogenboom and Winter, J. Mol. Biol. 227:381 (1991), and Marks et al., J. Mol. Biol. 222:581 (1991)). Techniques for the generation and use of antibody phage libraries are also described in U.S. Pat. Nos. 5,969,108, 6,172,197, 5,885,793, 6,521,404; 6,544,731; 6,555,313; 6,582,915; 6,593,081; 6,300,064; 6,653,068; 6,706,484; and 7,264,963, each of which is incorporated by reference in its entirety.

[0964] Affinity maturation strategies and chain shuffling strategies (Marks et al., BioTechnology 10:779-783 (1992), incorporated by reference in its entirety) are known in the art and can be employed to generate high affinity human antibodies or antigen-binding fragments thereof.

[0965] In some aspects, a binding molecule disclosed herein (e.g., an anti-FIX antibody, anti-FX antibody, or bispecific anti-FIX/anti-FX antibody) can be a humanized antibody. Methods for engineering, humanizing or resurfacing non-human or human antibodies can also be used and are well known in the art. A humanized, resurfaced or similarly engineered antibody can have one or more amino acid residues from a source that is non-human, e.g., but not limited to, mouse, rat, rabbit, non-human primate or other mammal. These non-human amino acid residues are replaced by residues that are often referred to as “import” residues, which are typically taken from an “import” variable, constant or other domain of a known human sequence. Such imported sequences can be used to reduce immunogenicity or reduce, enhance or modify binding, affinity, on-rate, off-rate, avidity, specificity, half-life, or any other suitable characteristic, as known in the art. In general, the CDR residues are directly and most substantially involved in influencing binding to a specific anti binding site (e.g., an epitope). Accordingly, part or all of the non-human or human CDR sequences are maintained while the non-human sequences of the variable and constant regions can be replaced with human or other amino acids. In certain aspects, human CDRs are inserted into non-human antibody scaffolds to make an antibody with reduced immunogenicity in an animal model system, e.g., a “murinized” antibody.

[0966] In some aspects, a binding molecule disclosed herein (e.g., an anti-FIX antibody, anti-FX antibody, or bispecific anti-FIX/anti-FX antibody) can be humanized, resurfaced, or engineered with retention of high affinity for the antigen binding site (e.g., an epitope) and other favorable biological properties. To achieve this goal, humanized (or human), engineered, or resurfaced binding molecules can be optionally prepared by a process of analysis of the parental sequences and various conceptual humanized and engineered products using three-dimensional models of the parental, engineered, and humanized sequences. Three-dimensional immunoglobulin models are commonly available and are familiar to those skilled in the art.

[0967] Computer programs are available which illustrate and display probable three-dimensional conformational structures of selected candidate immunoglobulin sequences. Inspection of these displays permits analysis of the likely role of the residues in the functioning of the candidate immunoglobulin sequence, i.e., the analysis of residues that influence the ability of the candidate immunoglobulin to bind its antigen. In this way, framework residues can be selected and combined from the consensus and import sequences so that the desired antibody characteristic, such as increased affinity for the target antigen(s), is achieved.

[0968] Humanization, resurfacing or engineering of a binding molecule disclosed herein (e.g., an anti-FIX antibody, anti-FX antibody, or bispecific anti-FIX/anti-FX antibody) can be performed using any known method, such as but not limited to those described in, Jones et al., Nature 321:522 (1986); Riechmann et al., Nature 332:323 (1988); Verhoeyen et al., Science 239:1534 (1988)), Sims et al., J. Immunol. 151: 2296 (1993); Chothia and Lesk, J. Mol. Biol. 196:901 (1987), Carter et al., Proc. Natl. Acad. Sci. U.S.A. 89:4285 (1992); Presta et al., J. Immunol. 151:2623 (1993), U.S. Pat. Nos. 5,639,641, 5,723,323; 5,976,862; 5,824,514; 5,817,483; 5,814,476; 5,763,192; 5,723,323; 5,766,886; 5,714,352; 6,204,023; 6,180,370; 5,693,762; 5,530,101; 5,585,089; 5,225,539; 4,816,567, 7,557,189; 7,538,195; and 7,342,110; WO90/14443; WO90/14424; WO90/14430; and EP229246, each of which is entirely incorporated herein by reference, including the references cited therein.

[0969] In certain an antibody fragment obtained from a binding molecule disclosed herein (e.g., an anti-FIX antibody, anti-FX antibody, or bispecific anti-FIX/anti-FX antibody) is provided. Various techniques are known for the production of antibody fragments. Traditionally, these fragments are derived via proteolytic digestion of intact antibodies (for example Morimoto et al., J. Biochem. Biophy. Methods 24:107-117 (1993); Brennan et al., Science, 229:81 (1985)).

[0970] In certain aspects, antibody fragments are produced recombinantly. Fab, Fv, and scFv antibody fragments can all be expressed in and secreted from E. coli or other host cells, thus allowing the production of large amounts of these fragments. Such antibody fragments can also be isolated from the antibody phage libraries discussed above. The antibody fragments can also be linear antibodies as described in U.S. Pat. No. 5,641,870. Other techniques for the production of antibody fragments will be apparent to the skilled practitioner.

[0971] Techniques can be adapted for the production of single-chain antibodies specific to the same epitope(s) as the binding molecules disclosed herein (e.g., anti-FIX antibodies, anti-FX antibodies, or bispecific anti-FIX/anti-FX antibodies). In addition, methods can be adapted for the construction of Fab expression libraries (see, e.g., Huse et al., Science 246:1275-1281 (1989)) to allow rapid and effective identification of monoclonal Fab fragments with the desired specificity for FIX and/or FX, or derivatives, fragments, analogs or homologs thereof. Antibody fragments can be produced by techniques in the art including, but not limited to: (a) a F(ab′)₂ fragment produced by pepsin digestion of an antibody molecule; (b) a Fab fragment generated by reducing the disulfide bridges of an F(ab′)₂ fragment, (c) a Fab fragment generated by the treatment of the antibody molecule with papain and a reducing agent, and (d) Fv fragments.

[0972] The binding molecules disclosed herein and antigen binding portion thereof, variants, or derivatives thereof, can be assayed for immunospecific binding by any method known in the art. The immunoassays that can be used include but are not limited to competitive and non-competitive assay systems using techniques such as Western blots, radioimmunoassays, ELISA (enzyme linked immunosorbent assay), “sandwich” immunoassays, immunoprecipitation assays, precipitin reactions, gel diffusion precipitin reactions, immunodiffusion assays, agglutination assays, complement-fixation assays, immunoradiometric assays, fluorescent immunoassays, protein A immunoassays, to name but a few. Such assays are routine and well known in the art (see, e.g., Ausubel et al., eds, (1994) Current Protocols in Molecular Biology (John Wiley & Sons, Inc., NY) Vol. 1, which is incorporated by reference herein in its entirety).

[0973] The binding activity of a given lot of a binding molecule disclosed herein, antigen binding portion thereof, variant, or derivative thereof, can be determined according to well-known methods. Those skilled in the art will be able to determine operative and optimal assay conditions for each determination by employing routine experimentation.

[0974] Methods and reagents suitable for determination of binding characteristics of a binding molecule disclosed herein or an antigen binding portion thereof, are known in the art and/or are commercially available. Equipment and software designed for such kinetic analyses are commercially available (e.g., BIACORE®, BIAevaluation software, GE Healthcare; KinExa Software, Sapidyne Instruments).

[0975] The practice of the present invention will employ, unless otherwise indicated, conventional techniques of cell biology, cell culture, molecular biology, transgenic biology, microbiology, recombinant DNA, and immunology, which are within the skill of the art. Such techniques are explained fully in the literature. See, for example, Sambrook et al., ed. (1989) Molecular Cloning A Laboratory Manual (2nd ed.; Cold Spring Harbor Laboratory Press); Sambrook et al., ed. (1992) Molecular Cloning: A Laboratory Manual, (Cold Springs Harbor Laboratory, NY); D. N. Glover ed., (1985) DNA Cloning, Volumes I and II; Gait, ed. (1984) Oligonucleotide Synthesis; Mullis et al. U.S. Pat. No. 4,683,195; Hames and Higgins, eds. (1984) Nucleic Acid Hybridization; Hames and Higgins, eds. (1984) Transcription And Translation; Freshney (1987) Culture Of Animal Cells (Alan R. Liss, Inc.); Immobilized Cells And Enzymes (IRL Press) (1986); Perbal (1984) A Practical Guide To Molecular Cloning; the treatise, Methods In Enzymology (Academic Press, Inc., N.Y.); Miller and Calos eds. (1987) Gene Transfer Vectors For Mammalian Cells, (Cold Spring Harbor Laboratory); Wu et al., eds., Methods In Enzymology, Vols. 154 and 155; Mayer and Walker, eds. (1987) Immunochemical Methods In Cell And Molecular Biology (Academic Press, London); Weir and Blackwell, eds., (1986) Handbook Of Experimental Immunology, Volumes I-IV; Manipulating the Mouse Embryo, Cold Spring Harbor Laboratory Press, Cold Spring Harbor, N.Y., (1986); and in Ausubel et al. (1989) Current Protocols in Molecular Biology (John Wiley and Sons, Baltimore, Md.).

[0976] General principles of antibody engineering are set forth in Borrebaeck, ed. (1995) Antibody Engineering (2nd ed.; Oxford Univ. Press). General principles of protein engineering are set forth in Rickwood et al., eds. (1995) Protein Engineering, A Practical Approach (IRL Press at Oxford Univ. Press, Oxford, Eng.). General principles of antibodies and antibody-hapten binding are set forth in: Nisonoff (1984) Molecular Immunology (2nd ed.; Sinauer Associates, Sunderland, Mass.); and Steward (1984) Antibodies, Their Structure and Function (Chapman and Hall, New York, N.Y.). Additionally, standard methods in immunology known in the art and not specifically described are generally followed as in Current Protocols in Immunology, John Wiley & Sons, New York; Stites et al., eds. (1994) Basic and Clinical Immunology (8th ed; Appleton & Lange, Norwalk, Conn.) and Mishell and Shiigi (eds) (1980) Selected Methods in Cellular Immunology (W.H. Freeman and Co., NY).

[0977] Standard reference works setting forth general principles of immunology include Current Protocols in Immunology, John Wiley & Sons, New York; Klein (1982) J., Immunology: The Science of Self-Nonself Discrimination (John Wiley & Sons, NY); Kennett et al., eds. (1980) Monoclonal Antibodies, Hybridoma: A New Dimension in Biological Analyses (Plenum Press, NY); Campbell (1984) “Monoclonal Antibody Technology” in Laboratory Techniques in Biochemistry and Molecular Biology, ed. Burden et al., (Elsevier, Amsterdam); Goldsby et al., eds. (2000) Kuby Immunology (4th ed.; H. Freemand & Co.); Roitt et al. (2001) Immunology (6th ed.; London: Mosby); Abbas et al. (2005) Cellular and Molecular Immunology (5th ed.; Elsevier Health Sciences Division); Kontermann and Dubel (2001) Antibody Engineering (Springer Verlag); Sambrook and Russell (2001) Molecular Cloning: A Laboratory Manual (Cold Spring Harbor Press); Lewin (2003) Genes VIII (Prentice Hall 2003); Harlow and Lane (1988) Antibodies: A Laboratory Manual (Cold Spring Harbor Press); Dieffenbach and Dveksler (2003) PCR Primer (Cold Spring Harbor Press).

### VIII. Pharmaceutical Compositions

[0978] The present disclosure also provides pharmaceutical compositions comprising, e.g., (i) an antibody or antigen binding portion thereof disclosed herein, a bispecific molecule (e.g., a bispecific antibody) disclosed herein, or an immunoconjugate disclosed herein, and (ii) a carrier.

[0979] In particular, the disclosure provides pharmaceutical compositions (e.g., therapeutic or diagnostic compositions) comprising,

(1) at least one therapeutically or diagnostically active component selected from the group consisting of
(i) binding molecules disclosed herein, e.g., anti-FIX antibodies or antigen binding portions thereof, anti-FX antibodies or antigen binding portions thereof, bispecific molecules comprising an anti-FIX specificity and/or an anti-FX specificity;
(ii) derivatives thereof, for example, immunoconjugates, fusion proteins, or derivatives with heterologous moieties that confer a desired property to the binding molecules disclosed herein (e.g., extended plasma half life);
(iii) polynucleotides encoding the binding molecules of (i) and/or the derivatives of (ii);
(iv) vectors comprising the polynucleotides of (iii);
(v) cells comprising the polynucleotides of (iii) or vectors of (iv); or,
(vi) combinations thereof; and,
(2) one or more carriers, excipients and/or diluents.

[0980] The pharmaceutical compositions disclosed herein may be suitable for veterinary uses or pharmaceutical uses in humans. The pharmaceutical compositions disclosed herein typically comprise one or more therapeutically or diagnostically active components described herein and one or more carriers, excipients and/or diluents. The form of the pharmaceutical composition (e.g., dry powder, liquid formulation, etc.) and the excipients, diluents, and/or carriers used will depend upon the intended uses of the compositions, therapeutic or diagnostic uses, and the mode of administration.

[0981] The pharmaceutical compositions comprising the therapeutically or diagnostically active components described herein are for use in, but not limited to, diagnosing, detecting, or monitoring a disorder, in preventing, treating, managing, or ameliorating a disorder or one or more symptoms thereof, and/or in research.

[0982] For therapeutic uses, the pharmaceutical compositions may be supplied as part of a sterile pharmaceutical composition that includes a pharmaceutically acceptable carrier. This pharmaceutical composition can be in any suitable form (depending upon the desired method of administering it to a patient). Methods to accomplish administration are known to those of ordinary skill in the art. The pharmaceutical composition can be administered to a patient by a variety of routes such as orally, transdermally, subcutaneously, intranasally, intravenously, intramuscularly, intratumorally, intrathecally, topically or locally. The most suitable route for administration in any given case will depend on the particular therapeutically or diagnostically active components, the subject, and the nature and severity of the disease and the physical condition of the subject. Typically, the pharmaceutical composition will be administered subcutaneously.

[0983] Pharmaceutical compositions can be conveniently presented in unit dosage forms containing a predetermined amount of a therapeutically or diagnostically active component described herein per dose. The quantity of the therapeutically or diagnostically active component included in a unit dose will depend on the disease being treated or diagnosed, as well as other factors as are well known in the art. Such unit dosages may be in the form of a lyophilized dry powder containing an amount of the therapeutically or diagnostically active component suitable for a single administration, or in the form of a liquid. Dry powder unit dosage forms may be packaged in a kit with a syringe, a suitable quantity of diluent and/or other components useful for administration. Unit dosages in liquid form may be conveniently supplied in the form of a syringe pre-filled with a quantity of the therapeutically or diagnostically active component suitable for a single administration.

[0984] The pharmaceutical compositions may also be supplied in bulk form containing quantities of the therapeutically or diagnostically active component suitable for multiple administrations.

[0985] The pharmaceutical compositions may also be included in a container, pack, or dispenser together with instructions for administration.

[0986] Pharmaceutical compositions may be prepared for storage as lyophilized formulations or aqueous solutions by mixing a therapeutically or diagnostically active component described herein having the desired degree of purity with optional pharmaceutically-acceptable carriers, excipients, or stabilizers typically employed in the art (all of which are referred to herein as “carriers”), i.e., buffering agents, stabilizing agents, preservatives, isotonifiers, non-ionic detergents, antioxidants, and other miscellaneous additives. See, Remington's Pharmaceutical Sciences, 16th edition (Osol, ed. 1980) and Remington: The Science and Practice of Pharmacy, 22nd Edition (Edited by Allen, Loyd V. Jr., 2012). Such additives should be nontoxic to the recipients at the dosages and concentrations employed.

[0987] Solutions or suspensions used for intradermal or subcutaneous application typically include one or more of the following components: a sterile diluent such as water for injection, saline solution, fixed oils, polyethylene glycols, glycerine, propylene glycol, or other synthetic solvents; antibacterial agents such as benzyl alcohol or methyl parabens; antioxidants such as ascorbic acid or sodium bisulfite; chelating agents such as ethylenediaminetetraacetic acid; buffers such as acetates, citrates, or phosphates; and agents for the adjustment of tonicity such as sodium chloride or dextrose. The pH can be adjusted with acids or bases, such as hydrochloric acid or sodium hydroxide. Such preparations may be enclosed in ampoules, disposable syringes, or multiple dose vials made of glass or plastic.

[0988] Pharmaceutical compositions suitable for injection include sterile aqueous solutions or dispersions and sterile powders for the extemporaneous preparation of sterile injectable solutions or dispersion. For intravenous administration, suitable carriers include physiological saline, bacteriostatic water, Cremophor EL (BASF, Parsippany, N.J.), or phosphate buffered saline. In all cases, the composition must be sterile and should be fluid to the extent that easy syringability exists. It must be stable under the conditions of manufacture and storage and must be preserved against the contaminating action of microorganisms such as bacteria and fungi. The carrier can be a solvent or dispersion medium containing, for example, water, ethanol, polyol (for example, glycerol, propylene glycol, and liquid polyetheylene glycol, and the like), and suitable mixtures thereof. The proper fluidity can be maintained, for example, by the use of a coating such as lecithin, by the maintenance of the required particle size in the case of dispersion and by the use of surfactants.

[0989] Preservatives may be added to retard microbial growth, and can be added in amounts ranging from about 0.2%-1% (w/v). Suitable preservatives for use with the present disclosure include phenol, benzyl alcohol, meta-cresol, methyl paraben, propyl paraben, octadecyldimethylbenzyl ammonium chloride, benzalconium halides (e.g., chloride, bromide, and iodide), hexamethonium chloride, and alkyl parabens such as methyl or propyl paraben, catechol, resorcinol, cyclohexanol, and 3-pentanol. Isotonicifiers sometimes known as “stabilizers” can be added to ensure isotonicity of liquid compositions of the present disclosure and include polyhydric sugar alcohols, for example trihydric or higher sugar alcohols, such as glycerin, erythritol, arabitol, xylitol, sorbitol and mannitol.

[0990] Stabilizers refer to a broad category of excipients which can range in function from a bulking agent to an additive which solubilizes the therapeutic agent or helps to prevent denaturation or adherence to the container wall. Typical stabilizers can be polyhydric sugar alcohols (enumerated above); amino acids such as arginine, lysine, glycine, glutamine, asparagine, histidine, alanine, ornithine, L-leucine, 2-phenylalanine, glutamic acid, threonine, etc., organic sugars or sugar alcohols, such as lactose, trehalose, stachyose, mannitol, sorbitol, xylitol, ribitol, myoinositol, galactitol, glycerol and the like, including cyclitols such as inositol; polyethylene glycol; amino acid polymers; sulfur containing reducing agents, such as urea, glutathione, thioctic acid, sodium thioglycolate, thioglycerol, α-monothioglycerol and sodium thiosulfate; low molecular weight polypeptides (e.g., peptides of 10 residues or fewer); proteins such as human serum albumin, bovine serum albumin, gelatin or immunoglobulins; hydrophilic polymers, such as polyvinylpyrrolidone monosaccharides, such as xylose, mannose, fructose, glucose; disaccharides such as lactose, maltose, sucrose and trehalose; and trisaccacharides such as raffinose; and polysaccharides such as dextran.

[0991] Buffering agents help to maintain the pH in the range which stabilizes the protein. They may be present at a wide variety of concentrations, but will typically be present in concentrations ranging from about 2 mM to about 50 mM.

[0992] Suitable buffering agents for use with the present disclosure include both organic and inorganic acids and salts thereof such as citrate buffers (e.g., monosodium citrate-disodium citrate mixture, citric acid-trisodium citrate mixture, citric acid-monosodium citrate mixture, etc.), succinate buffers (e.g., succinic acid-monosodium succinate mixture, succinic acid-sodium hydroxide mixture, succinic acid-disodium succinate mixture, etc.), tartrate buffers (e.g., tartaric acid-sodium tartrate mixture, tartaric acid-potassium tartrate mixture, tartaric acid-sodium hydroxide mixture, etc.), fumarate buffers (e.g., fumaric acid-monosodium fumarate mixture, fumaric acid-disodium fumarate mixture, monosodium fumarate-disodium fumarate mixture, etc.), gluconate buffers (e.g., gluconic acid-sodium gluconate mixture, gluconic acid-sodium hydroxide mixture, gluconic acid-potassium gluconate mixture, etc.), oxalate buffer (e.g., oxalic acid-sodium oxalate mixture, oxalic acid-sodium hydroxide mixture, oxalic acid-potassium oxalate mixture, etc.), lactate buffers (e.g., lactic acid-sodium lactate mixture, lactic acid-sodium hydroxide mixture, lactic acid-potassium lactate mixture, etc.) and acetate buffers (e.g., acetic acid-sodium acetate mixture, acetic acid-sodium hydroxide mixture, etc.). Additionally, phosphate buffers, histidine buffers and trimethylamine salts such as Tris can be used.

[0993] Additional miscellaneous excipients include bulking agents (e.g., starch), chelating agents (e.g., EDTA), antioxidants (e.g., ascorbic acid, methionine, vitamin E), and co-solvents.

### IX. Treatment and Diagnostic Methods

[0994] The present disclosure also provides treatment and diagnostic methods comprising the use of the binding molecules disclosed herein (e.g., anti-FIX antibodies, anti-FX antibodies, or bispecific anti-FIX/anti-FX antibodies) or other compositions of the present disclosure (e.g., nucleic acids, vectors, cells).

[0995] (a) Therapeutic Uses

[0996] In one aspect, the binding molecules disclosed herein (e.g., anti-FIX antibodies, anti-FX antibodies, or bispecific anti-FIX/anti-FX antibodies) or other compositions of the present disclosure (e.g., nucleic acids, vectors, cells) may be used to prevent, treat, or reverse a coagulation or bleeding disorder. In another aspect, the method comprises administering to a subject in need thereof, a binding molecule disclosed herein (e.g., anti-FIX antibodies, anti-FX antibodies, or bispecific anti-FIX/anti-FX antibodies) or other composition of the present disclosure (e.g., nucleic acids, vectors, cells). The subject can be a mammal, such as but not limited to a human, a mouse, a rat, a guinea pig, a domesticated animal, such as, but not limited to, a cow, a horse, a sheep, a pig, a goat, a cat, a dog, a hamster, a donkey. In one aspect, the subject is a human.

[0997] In various aspects, the coagulation or bleeding disorder is caused by the absence of a coagulation factor. One of skill in the art would appreciate the types of coagulation or bleeding disorders associated with the absence of a coagulation factor. In some aspects, the coagulation or bleeding disorder may be hemophilia or von Willebrand disease. In another aspect, the coagulation or bleeding disorder is hemophilia A or acquired hemophilia. In a particular aspect, the coagulation or bleeding disorder is hemophilia A. In another aspect, the coagulation or bleeding disorder is acquired hemophilia where the subject no longer produces FVIII.

[0998] In various aspects, the binding molecules disclosed herein (e.g., anti-FIX antibodies, anti-FX antibodies, or bispecific anti-FIX/anti-FX antibodies) or other compositions of the present disclosure (e.g., nucleic acids, vectors, cells) may be administered to a subject with mild hemophilia A, moderate hemophilia A, or severe hemophilia A. In another aspect, the binding molecules disclosed herein (e.g., anti-FIX antibodies, anti-FX antibodies, or bispecific anti-FIX/anti-FX antibodies) or other compositions of the present disclosure (e.g., nucleic acids, vectors, cells) may be administered to a subject with factor plasma levels of 6% to 30%, 2% to 5%, or 1% or less.

[0999] In some aspects, the binding molecules disclosed herein (e.g., anti-FIX antibodies, anti-FX antibodies, or bispecific anti-FIX/anti-FX antibodies) or other compositions of the present disclosure (e.g., nucleic acids, vectors, cells) may be administered to a subject with hemophilia A or suspected of having hemophilia A when there is an external wound on the subject. In another aspect, the binding molecules disclosed herein (e.g., anti-FIX antibodies, anti-FX antibodies, or bispecific anti-FIX/anti-FX antibodies) or other compositions of the present disclosure (e.g., nucleic acids, vectors, cells) may be administered to a subject with hemophilia A or suspected of having hemophilia A with an existing external wound on the subject. In another aspect, the binding molecules disclosed herein (e.g., anti-FIX antibodies, anti-FX antibodies, or bispecific anti-FIX/anti-FX antibodies) or other compositions of the present disclosure (e.g., nucleic acids, vectors, cells) may be administered to a subject with an external wound until the wound has healed. In some aspects, the wound may include, but not limited to, an abrasion, a laceration, a puncture, or an avulsion.

[1000] In some aspects, the binding molecules disclosed herein (e.g., anti-FIX antibodies, anti-FX antibodies, or bispecific anti-FIX/anti-FX antibodies) or other compositions of the present disclosure (e.g., nucleic acids, vectors, cells) may be administered to a subject with hemophilia, A or suspected of having hemophilia A, prior to, during, or after surgery, a serious injury, or dental work.

[1001] In some aspects, the binding molecules disclosed herein (e.g., anti-FIX antibodies, anti-FX antibodies, or bispecific anti-FIX/anti-FX antibodies) or other compositions of the present disclosure (e.g., nucleic acids, vectors, cells) may be administered to a subject with hemophilia A, or suspected of having hemophilia A, and has experienced spontaneous bleeding. In another aspect, the binding molecules disclosed herein (e.g., anti-FIX antibodies, anti-FX antibodies, or bispecific anti-FIX/anti-FX antibodies) or other compositions of disclosure (e.g., nucleic acids, vectors, cells) may be administered to a subject with hemophilia A, or suspected of having hemophilia A, and has experienced bleeding once, twice, or more times in a week.

[1002] In various aspects, the binding molecules disclosed herein (e.g., anti-FIX antibodies, anti-FX antibodies, or bispecific anti-FIX/anti-FX antibodies) or other compositions of the present disclosure (e.g., nucleic acids, vectors, cells) may be administered to a subject of any age group suffering from, or suspected of having hemophilia A. In some aspects, the binding molecules disclosed herein (e.g., anti-FIX antibodies, anti-FX antibodies, or bispecific anti-FIX/anti-FX antibodies) or other compositions of the present disclosure (e.g., nucleic acids, vectors, cells) may be administered to a child of 1, 2, 3, 4, 5, 6, 7, 8, 9, 10, 11, 12, 13, 14, 15, 16, or 17 years of age suffering from, or suspected of having hemophilia A. In another aspect, the binding molecules disclosed herein (e.g., anti-FIX antibodies, anti-FX antibodies, or bispecific anti-FIX/anti-FX antibodies) or other compositions of the present disclosure (e.g., nucleic acids, vectors, cells) thereof may be administered to an infant suffering from or suspected of having hemophilia A.

[1003] In yet another aspects, the binding molecules disclosed herein (e.g., anti-FIX antibodies, anti-FX antibodies, or bispecific anti-FIX/anti-FX antibodies) or other compositions of the present disclosure (e.g., nucleic acids, vectors, cells) may be administered to a subject who is an infant of 0, 1, 2, 3, 4, 5, 6, 7, 8, 9, 10, 11, or 12 months of age suffering from, or suspected of having hemophilia A.

[1004] In some aspects, the binding molecules disclosed herein (e.g., anti-FIX antibodies, anti-FX antibodies, or bispecific anti-FIX/anti-FX antibodies) or other compositions of the present disclosure (e.g., nucleic acids, vectors, cells) are administered to a subject at an early age before the first episode of bleeding.

[1005] In other aspects, administering the binding molecules disclosed herein (e.g., anti-FIX antibodies, anti-FX antibodies, or bispecific anti-FIX/anti-FX antibodies) or other compositions of the present disclosure (e.g., nucleic acids, vectors, cells) before the first episode of bleeding protects against further bleeding and development of joint damage in the future.

[1006] In some embodiments, administering a binding molecule disclosed herein (e.g., anti-FIX antibodies, anti-FX antibodies, or bispecific anti-FIX/anti-FX antibodies) or another composition of the present disclosure (e.g., nucleic acids, vectors, cells) to subjects may have the following effects, but is not limited to, hemostasis, reduced pain, and improved mobility.

[1007] Also provided is method of promoting FX activation in a subject in need thereof, comprising administering to the subject a therapeutically effective amount of an antibody, bispecific molecule, immunoconjugate, pharmaceutical composition, nucleic acid (e.g., DNA or mRNA), vector, or cell (e.g., a host cell) disclosed herein, or a combination thereof.

[1008] Also provided is a method of reducing the frequency or degree of a bleeding episode in a subject in need thereof, comprising administering to the subject an effective amount of an antibody, bispecific molecule, immunoconjugate, pharmaceutical composition, nucleic acid (e.g., DNA or mRNA), vector, or cell (e.g., a host cell) disclosed herein, or a combination thereof.

[1009] In some aspects, the subject has developed, has a tendency to develop, and is at risk to develop an inhibitor against Factor VIII (“FVIII”). In some aspects, the inhibitor against FVIII is a neutralizing antibody against FVIII. In some aspect, the subject is undergoing treatment with FVIII or is a candidate for treatment with FVIII, e.g., FVIII replacement therapy.

[1010] In some aspects, the bleeding episode is the result of hemarthrosis, muscle bleed, oral bleed, hemorrhage, hemorrhage into muscles, oral hemorrhage, trauma, trauma capitis, gastrointestinal bleeding, intracranial hemorrhage, intra-abdominal hemorrhage, intrathoracic hemorrhage, bone fracture, central nervous system bleeding, bleeding in the retropharyngeal space, bleeding in the retroperitoneal space, bleeding in the illiopsoas sheath, or any combinations thereof.,

[1011] The present disclosure also provides a method of treating a blood coagulation disorder in a subject in need thereof, comprising administering to the subject an effective amount of a bispecific molecule, immunoconjugate, pharmaceutical composition, nucleic acid (e.g., DNA or mRNA), vector, or cell (e.g., a host cell) disclosed herein, or a combination thereof.

[1012] In some aspects, the blood coagulation disorder is hemophilia A or hemophilia B. In some aspects, the subject is a human subject.

[1013] In some aspects, the subject is undergoing or has undergone FVIII replacement therapy. In some aspects, the bispecific molecule is administered in combination with a hemophilia therapy. In some aspects, the hemophilia therapy is a FVIII replacement therapy. In some aspects, the bispecific molecule is administered before, during or after administration of the hemophilia therapy. In some aspects, the bispecific molecule is administered intravenously or subcutaneously.

[1014] In some aspects, administration of the bispecific molecule reduces the frequency of break-through bleeding episodes, spontaneous bleeding episodes, or acute bleeding. In some aspects, administration of the bispecific molecule reduces the annualized bleed rate by 5%, 10%, 20%, 30%, or 50%.

[1015] The binding molecules disclosed herein (e.g., anti-FIX antibodies, anti-FX antibodies, or bispecific anti-FIX/anti-FX antibodies) may be administered by any route appropriate to the condition to be treated. The binding molecules disclosed herein (e.g., anti-FIX antibodies, anti-FX antibodies, or bispecific anti-FIX/anti-FX antibodies) will typically be administered parenterally, i.e., infusion, subcutaneous, intramuscular, intravenous, or intradermal. In some aspects, the binding molecules disclosed herein (e.g., anti-FIX antibodies, anti-FX antibodies, or bispecific anti-FIX/anti-FX antibodies) are administered subcutaneously.

[1016] In certain aspects, the binding molecules disclosed herein (e.g., anti-FIX antibodies, anti-FX antibodies, or bispecific anti-FIX/anti-FX antibodies) are administered intermittently or discontinuously. In various aspects, dose levels of the binding molecules disclosed herein (e.g., anti-FIX antibodies, anti-FX antibodies, or bispecific anti-FIXa/anti-FX antibodies), for example, administered via injection, such as subcutaneous injection range from about 0.0001 mg/kg to about 100 mg/kg bodyweight.

[1017] In some aspects, the binding molecules disclosed herein (e.g., anti-FIX antibodies, anti-FX antibodies, or bispecific anti-FIX/anti-FX antibodies) are administered until disease progression or unacceptable toxicity.

[1018] (b) Diagnostic Uses

[1019] The present disclosure further provides diagnostic methods useful for diagnosis of diseases characterized by the abnormal or defective expression of clotting factors, such as FIX and FX. In some aspects, the diagnosis involves measuring the expression level of FIX (e.g., FIXa) and/or FX (e.g., FXz) in tissues or body fluids from an individual and comparing the measured expression level with a standard expression level of FIX (e.g., FIXa) and/or FX (e.g., FXz) in normal tissue or body fluid, whereby an increase or decrease in the expression level compared to the standard is indicative of a disorder.

[1020] The binding molecules of the instant disclosure and antigen-binding fragments, variants, and derivatives thereof, can be used to assay FIX (e.g., FIXa) and/or FX (e.g., FXz) protein levels in a biological sample using classical immunohistological methods known to those of skill in the art (e.g., see Jalkanen, et al., J. Cell. Biol. 101:976-985 (1985); Jalkanen et al., J. Cell Biol. 105:3087-3096 (1987)).

[1021] Other antibody-based methods useful for detecting FIX (e.g., FIXa) and/or FX (e.g., FXz) protein expression include immunoassays, such as the enzyme linked immunosorbent assay (ELISA), immunoprecipitation, or Western blotting. Suitable assays are described in more detail elsewhere herein.

[1022] The phrase assaying the expression level of FIX (e.g., FIXa) or FX (e.g., FXz) polypeptide refers both to qualitatively or quantitatively measuring or estimating the level of FIX (e.g., FIXa) or FX (e.g., FXz) polypeptide in a first biological sample either directly (e.g., by determining or estimating absolute protein level) or relatively (e.g., by comparing to the disease associated polypeptide level in a second biological sample).

[1023] FIX (e.g., FIXa) or FX (e.g., FXz) polypeptide expression level in the first biological sample can be measured or estimated and compared to a standard FIX (e.g., FIXa) or FX (e.g., FXz) polypeptide level, the standard being taken from a second biological sample obtained from an individual not having the disorder or being determined by averaging levels from a population of individuals not having the disorder. As will be appreciated in the art, once the “standard” FIX (e.g., FIXa) or FX (e.g., FXz) polypeptide level is known, it can be used repeatedly as a standard for comparison.

[1024] The present disclosure provides a method of measuring a level of activated FIX in a subject in need thereof comprising contacting an anti-FIXa antibody disclosed herein, or antigen binding portion thereof, with a sample obtained from the subject under suitable conditions and measuring the binding of the anti-FIXa antibody or antigen binding portion thereof to FIXa in the sample.

[1025] In one embodiment, the anti-FIXa antibody or antigen binding portion thereof in Class I can be used to measure the level of activated FIX in a tenase complex compared to free FIXa or FIX zymogen. In another embodiment, the anti-FIXz antibody or antigen binding portion thereof in Class IV can be used to measure the level of FIX zymogen compared to free FIXa or FIXa in a tenase complex. In other embodiments, the anti-FIXa antibody or antigen binding portion thereof in Class II can be used to measure the level of free FIXs compared to FIXa in a tenase complex or FIX zymogen. In some embodiments, the anti-FIXa antibody or antigen binding portion thereof in Class III can be used to measure the level of activated FIX (i.e., free FIXa and FIXa in a tenase complex) compared to FIX zymogen.

[1026] Also provided is a method of measuring zymogen FX (FXz) in a subject in need thereof comprising contacting an anti-FXz antibody, or antigen binding portion thereof, in Class V with a sample obtained from the subject under suitable conditions and measuring the binding of the anti-FX antibody or antigen binding portion thereof to FXz in the sample. In other embodiments, the anti-FXa antibody, or antigen binding portion thereof, in Class VI can be used to measure the level of activated FX compared to FX zymogen. In some aspects, the sample is blood or serum.

### X. Combination Treatments

[1027] The binding molecules disclosed herein (e.g., anti-FIX antibodies, anti-FX antibodies, or bispecific anti-FIX/anti-FX antibodies) can be administered as the sole active agent or can also be administered in combination with one or more additional medicaments or therapeutic agents useful in the treatment of various diseases, e.g., as a combination therapy. For example, the additional agent can be a therapeutic agent art-recognized as being useful to treat the disease or condition being treated by the bispecific antibody provided herein. The combination can also include more than one additional agent, e.g., two or three additional agents.

[1028] In certain embodiments, the additional medicament or therapeutic agent is an agent routinely used in the treatment of coagulation or bleeding disorders. Those skilled in the art will recognize routine therapeutic agents. In some embodiments, the additional therapeutic agent is a hemophilia therapy agent. An exemplary hemophilia therapy agent includes, but is not limited to factor concentrate replacement therapy. In particular embodiments, cofactor replacement therapy is FVIII replacement therapy. Those skilled in the art would know that replacement therapy may be plasma-derived and/or recombinant FVIII replacement. In some embodiments, the FVIII replacement therapy is recombinant FVIII. In another embodiment, the FVIII replacement therapy is plasma-derived FVIII. In various embodiments, the additional medicament or therapeutic agent may include, for example, desmopressin acetate, clot-preserving medications (e.g., antifibrinolytics), or fibrin sealants.

[1029] In certain embodiments, the additional medicament or therapeutic agent can be administered to a subject, before, during, or after administration of the antibodies described herein. In various embodiments, the additional medicament or therapeutic agent and the antibodies provided herein may be administered on the same dosing schedule. In some embodiments, the additional medicament or therapeutic agent is administered concurrently with the antibodies described herein.

[1030] In various embodiments, the additional medicament or therapeutic agent is administered prophylactically or on a need basis. In another embodiment, the additional medicament or therapeutic agent is administered as the primary treatment. In other embodiments, the additional medicament or therapeutic agent is administered as the secondary treatment.

[1031] In some embodiments, when a binding molecule disclosed herein (e.g., an anti-FIX antibody, and anti-FX antibody, a bispecific anti-FIX/anti-FX antibody, or an immunoconjugate) is administered with or adjunctive to standards of care, the treatment with the binding molecule disclosed herein can be initiated prior to the commencement of standard therapy, for example a day, several days, a week, several weeks, a month or even several months before the commencement of standard therapy.

### XI. Kits

[1032] The present disclosure also provides kits that comprise an binding molecule disclosed herein or an antigen binding portion thereof that can be used to perform the methods described herein. In certain aspects, a kit comprises (i) an antibody, bispecific molecule, immunoconjugate, pharmaceutical composition, nucleic acid (e.g., DNA or mRNA), vector, or cell (e.g., a host cell) disclosed herein, or a combination thereof, and (ii) instructions for use. In some aspects, a kit comprises an antibody, bispecific molecule, immunoconjugate, pharmaceutical composition, nucleic acid (e.g., DNA or mRNA), vector, or cell (e.g., a host cell) disclosed herein, or a combination thereof, in one or more containers.

[1033] In some aspects, the kits contain all of the components necessary and/or sufficient to perform a detection assay, including all controls, directions for performing assays, and any necessary software for analysis and presentation of results.

[1034] One skilled in the art will readily recognize that the antibodies, bispecific molecules (e.g., bispecific antibodies), immunoconjugates, pharmaceutical compositions, nucleic acids (e.g., DNA or mRNA), vectors, or cells (e.g., a host cell) disclosed herein, or combinations thereof can be readily incorporated into one of the established kit formats which are well known in the art.

### EXAMPLES

### Example 1

### Generation of Antibodies that Preferentially Bind to FIXa Over FIX

[1035] Design of Antibody Selections and Antibody Production: A series of human antibodies against human activated FIX was selected from a human antibody Adimab yeast library (ADIMAB, 7 Lucent Drive, Lebanon, N.H. 03766). Antibody selections were performed using three different Factor IX variants:

(i) “non-activatable FIX” (also abbreviated as FIXn) which is Factor IX carrying an arginine to alanine mutation at position 180 (mature numbering) preventing its activation and maintaining Factor IX in the zymogen form (FIXz);
(ii) “free FIXa,” which is a form of activated FIX and is believed to be in a conformation of activated FIX when not bound FVIIIa in a tenase complex); and
(iii) “FIXa-SM,” which is a form of activated FIX with a substrate mimic (e.g., L-Glu-Gly-Arg chloromethyl ketone, i.e., EGR-CMK) covalently bound to the active site, which is intended to mimic the most active conformation of activated FIX.

[1036] The schematic diagrams of FIX zymogen (e.g., non-activatable FIX), free activated FIX, and FIXa-SM (e.g, Factor IXa+EGR-CMK) are shown in FIG. 1A.

[1037] In each case, the FIX sequence was followed by a GS-linker and biotinylation tag at the C-terminus of the molecules. When co-expressed with the biotin ligase, BirA, in the presence of biotin, the resulting FIX molecule will carry a single biotin label to enable selections with the Adimab display library.

[1038] Non-activatable FIX was recombinantly expressed with BirA in the presence of biotin and purified according to methods known in the art. Free FIXa, also co-expressed with BirA in the presence of biotin, was generated from the expression of a non-activated precursor (FIX zymogen), which was purified in the same manner as non-activatable FIX. Non-activated FIX precursor was then activated by the addition of recombinant coagulation Factor XIa at a molar ratio of 1:500 in the presence of calcium and subsequently purified by size exclusion chromatography according to methods known in the art.

[1039] Addition of a tripeptide chloromethylketone (i.e., EGR-CMK) to free FIXa results in the covalent linkage of the peptide, or substrate mimic, and the active site of FIXa. While the irreversible linkage with the peptide neutralizes FIXa activity, the complex is thought to mimic the substrate-bound, or most active conformation of FIXa. To generate activated Factor IX with a substrate mimic covalently bound to the active site (i.e., FIXa-SM), free FIXa was incubated with a 5-fold molar excess of the peptide in the presence of calcium and 30% ethylene glycol for six hours. Excess peptide was removed either by size exclusion chromatography or dialysis and saturation of the active site was confirmed by mass spectrometry.

[1040] The FIX proteins used in the example described above were recombinantly produced according to the methods known in the art. The sequences of the clotting factors are: non-activatable FIX (SEQ ID NO: 773), free FIXa (47 to 191 of SEQ ID NO: 764 and amino acids 227 to 461 of SEQ ID NO: 764), and FIXa-SM are (47 to 191 of SEQ ID NO: 764 and amino acids 227 to 461 of SEQ ID NO: 764 with EGR-CMK covalently bound to the active site) are shown in TABLE 4.

[1041] All FIX proteins were buffer exchanged into Tris-buffered saline with 5 mM CaCl₂ as an additive, according to methods known in the art.

[1042] A set of antibodies against FIXa were generated, which are capable of preferentially associating with FIXa versus FIX, in a manner similar to that of FVIIIa, are described. To generate these classes of antibodies, Adimab expression libraries were screened in accordance with the methods disclosed in U.S. Publication Nos. 2010/0056386 and 2009/0181855, which are herein incorporated by reference in their entireties. See, e.g., Van Deventer and Wittrup (2014) Methods Mol. Biol. 1319:3-36; Chao et al. (2006), Nature Protocols 1(2):755-768; Feldhaus et al. (2003) Nature Biotechnology 21(2):163-170; Boder and Wittrup (1997) Nature Biotechnology 15(6):553-557, all of which are herein incorporated by reference in their entireties.

[1043] Following several iterative rounds of positive selective pressure towards the targeted antigen free FIXa and/or FIXa-SM and negative selective pressure against the non-activatable FIX, colonies were sequenced to identify unique clones, using techniques known in the art. Following antibody selection, 658 antibodies of these selective antibodies were expressed and purified on protein A resin from yeast, according to standard methodology. Subsequently, the 658 antibodies were screened again for their preferential binding to free FIXa and/or mimic-bound FIXa versus non-activatable FIX, this time by Bio-Layer Interferometry (BLI).

[1044] Unless otherwise noted, all the antigens in the BLI experiments disclosed herein were purchased from Haematologic Technologies, Inc. (HTI, 57 River Road, Essex Junction, Vt., USA): FIXz (Cat. No. HCIX-0040), free FIXa (Cat. No. HCIXA-0050) and FIXa-SM (Cat. No. HCIXA-EGR). The OctetRed94, Ocetet QK 384, or the Octet HTX system were used for all BLI experiments. All methods, with regard to antibody and antigen concentrations as well as incubation times for the various steps, are based on manufacturer recommendations. Baseline steps were 60 seconds. Antibodies were loaded onto anti-human IgG Quantitation probes at concentrations ranging from 100-200 nM or 10-15 ug/mL for 180 seconds. Antigen concentrations ranged from 10-250 nM and the association of the antigen to the antibody-loaded probes range from 90-180 seconds. The dissociation steps were performed in buffer alone for 90-180 seconds. All BLI experiments were performed with buffers including 100-200 nM NaCl, 25-50 mM Tris pH 7.4-8.0 or 25-50 mM Hepes pH 7.4-8.0, with or without 0.1% BSA, with or without 2.5-5 mM CaCl₂). Additional details for specific experiments are given in the examples below. The relative binding of various antibodies to a particular antigen is generally reported as the “response,” or the change in nanometer shift from the beginning to the end of the association phase. The antigen binding response is dependent on the amount of antibody loaded onto the probe during the loading phase. Therefore, if the amount of antibody loaded onto the probe is the same, and the concentration of the antigens and the length of the association phase are the same, these responses are comparable. In other cases, the ForteBio Data Analysis software may be used to calculate a K_{D}. In all cases, the lack of non-specific binding of the antigens to the anti-human IgG AHQ probes was confirmed.

[1045] An outline of the experimental triage to identify antibodies that preferentially bound free FIXa and FIXa-SM is shown in FIG. 2. Details of the triage scheme are provided in the “Characterization of Antibody Binding to Target Antigen” and “Screening of Antibodies for Biophysical Behavior” sections below.

[1046] This additional antibody triage resulted in a set of 93 antibodies that may preferential bind to free FIXa and/or FIXa-SM. The amino acid and nucleic acid sequences of the variable regions are provided below. The germline and CDR sequences of the VH and VL of those 93 antibodies are shown in FIGS. 3A, 3B, 3C and FIG. 3D (except BIIB-9-1335 and BIIB-9-1336, which were obtained by the method shown in Example 5 below).

[1047] Characterization of Antibody Binding to Target Antigen FIXa: To identify antibodies discovered in our preliminary selections that demonstrated preferential binding to free FIXa in comparison to non-activatable FIX, the 658 antibodies purified from the yeast Adimab library were screened using BLI in a monovalent assay format with 150 nM antibody using anti-Human IgG Quantitation (AHQ) dip and read biosensors (Pall ForteBio: Catalog #18-5005). BLI was performed on the OctetRed94 or the Octet HTX system, according to standard procedure. Briefly, biosensors were equilibrated in Tris-buffered saline supplemented with 5 mM CaCl₂ and 0.1% bovine serum albumin (TBSFCa). Plates were then transferred to the instrument. A soak step was performed on the instrument, with incubation of the biosensors for 60 seconds in TBSFCa. Then, the biosensors were transferred to wells containing the representative IgG (150 nM in TBSFCa) for 180 seconds. Following this, the biosensors were incubated in TBSFCa for 60 seconds to establish baseline. Next, the biosensors were transferred to wells containing the desired antigen (100 nM in TBSFCa) and incubated for 90 seconds. Finally, the sensors were transferred to TBSFCa alone for 90 seconds incubation.

[1048] Nearly all of the 658 antibodies identified in the initial yeast library selections directed towards free FIXa specificity displayed greater approximate binding affinity to free FIXa than to non-activatable FIX. Four antibodies (i.e., BIIB-9-397, BIIB-9-578, BIIB-9-612, and BIIB-9-631) had greater binding affinity to non-activatable FIX than to free FIXa in the BLI assay.

[1049] The maximum response value (nm) following the antigen association phase, for either 100 nM free FIXa or non-activatable FIX, was plotted for each of the 93 antibodies identified in the selections (FIG. 4A and FIG. 4B).

[1050] Antibodies whose binding affinity to free FIXa, as measured by BLI, was higher than to non-activatable FIX are likely to preferentially bind free FIXa, e.g., due to the selective binding to an epitope on human FIXa which is unique to FIXa, or to an epitope on FIXa which is significantly different from a corresponding epitope on FIX zymogen. In other words, the preferential binding of the antibodies to FIXa may be driven, e.g., by the binding to an epitope that is absent in FIX zymogen, or by the higher binding affinity to the same epitope or a variant thereof (e.g., an overlapping epitope or a conformationally different epitope).

[1051] FIG. 5 shows a table of apparent monovalent affinity (K_{D}) to free FIXa for each of the listed antibodies as determined by 1:1 fitting algorithms provided in the ForteBio Data Analysis 9.0 software.

[1052] BLI binding profiles for a select subset of antibodies analyzed are provided in FIGS. 6A-6E. Approximate monovalent affinities to free FIXa or non-activatable FIX for a select set of antibodies test, as determined by BLI, are listed in FIG. 6F.

[1053] It is predicted that bispecific antibodies that preferentially recognize the more active conformation of FIXa (i.e., FXa-SM), will have higher activity than those that preferentially bind to free FIXa.

[1054] As demonstrated in FIG. 7, a subset of the 93 antibodies that displayed greater binding affinity to free FIXa than to non-activatable FIX were further assessed for their binding to 100 nM free FIXa and to 100 nM FIXa-SM in a BLI monovalent binding assay with 150 nM antibody on the OctetRed94 or the Octet HTX system according to manufacturer's procedures. Briefly, anti-Human IgG Quantitation (AHQ) dip and read biosensors (Pall Fortebio: Catalog #18-5005) were equilibrated in TBSFCa. Plates were then transferred to the instrument. A soak step was performed on the instrument, with incubation of the biosensors for 60 seconds in TBSFCa. Then, the biosensors were transferred to wells containing the representative IgG (150 nM in TBSFCa) for 180 seconds. Following this, the biosensors were incubated in TBSFCa for 60 seconds to establish baseline. Then, the biosensors were transferred to wells containing the desired antigen (100 nM in TBSFCa) and incubated for 90 seconds. Finally, the sensors were transferred to TBSFCa alone for a 90-second incubation.

[1055] For a number of antibodies, greater binding to FIXa-SM than to free FIXa was observed. Representative examples of BLI binding profiles for association to each target antigen are provided in FIG. 8A-8E. A table in FIG. 8F, lists the apparent affinities for tested antibodies to each target antigen according to fitting algorithms provided in the ForteBio Data Analysis 9.0 software.

[1056] Four classes of antibodies were identified from BLI experiments intended to address specificity of the antibodies discovered in the selections: Class I: Antibodies preferentially bind to FIXa-SM compared to either free FIXa or non-activatable FIX. BIIB-9-460 and BIIB-9-484 are examples of this class, as shown in FIG. 9A; Class II: Antibodies preferentially bind to free FIXa than to FIXa-SM or non-activatable FIX, as represented by BIIB-9-885 and BIIB-9-416 (FIG. 9B); Class III: Antibodies bind to either FIXa-SM or free FIXa with near equivalency, but do not appreciably associate with non-activatable FIX. BIIB-9-1287 serves as an example of this class (FIG. 9C); and, Class IV: Antibodies preferentially bind to non-activatable FIX compared to free FIXa or FIXa-SM (FIG. 9D). BIIB-9-397 serves as an example of this class

[1057] A table listing the class assignment for all of the anti-FIX antibodies (e.g., anti-FIXa antibody or anti-FIXz antibody) disclosed herein is provided in FIG. 10.

[1058] Screening of Antibodies for Biophysical Behavior: 93 anti-FIX antibodies were examined by affinity capture self-interaction nanoparticle spectroscopy (AC-SINS), an assay that micro-concentrates target antibody on the surface of nanoparticles to assess self-association. AC-SINS screens to identify antibodies with poor biophysical properties, e.g., self-aggregation, in relation to their peers were performed according to methods described in the literature. See, e.g., Liu et al. (2014) MAbs. 6(2):483-92; and Wu et al. (2015) Protein Engineering, Design and Selection 28: 403-414, both of which are herein incorporated by reference in their entireties. Each antibody was captured on the surface of gold nanoparticles with a starting concentration of 40 μg/ml in a volume of 100 μl and incubated at room temperature for two hours. Following the incubation, absorbance across a spectrum of wavelengths was determined. In cases of antibody self-association, the inter-particle distance decreases, resulting in higher wavelengths of maximum absorbance. In comparison to internal standards of biophysical behavior, maximum wavelengths of greater than 540 nm are indicative of antibodies that have a propensity to self-interact. A table listing the calculated maximum wavelengths for 93 anti-FIX antibodies as determined by AC-SINS is shown in FIG. 11.

### Example 2

### Generation of Antibodies that Preferentially Bind to FX Over FXa

[1059] Design of Antibody Selections and Antibody Production: With the goal of obtaining antibodies that selectively bind to FX zymogen (e.g., non-activatable factor X (FX)) over activated Factor X (FXa), antibody selections from an yeast Adimab human antibody library were performed using three different Factor X variants:

(i) “non-activatable Factor X” (“FXn”), which is FX carrying an arginine to alanine mutation at position 194 (mature numbering) preventing its activation and maintaining FX in the zymogen form. This was the FXz (zymogen FX) that was used for BLI experiments. FXn was produced and biotinylated in house as described below;
(ii) “free FX,” (“FXa”) which is a form of activated FX without any substrate mimic and is believed to be in a wild-type activated FX conformation (HTI, Cat No. HCXA-0060); and,
(iii) “FXa-SM,” which is a form of activated Factor X with a substrate mimic (e.g., EGR-CMK) covalently bound to the active site (HTI, Cat No. HCXA-EGR). In some cases the substrate mimic was biotinylated (BEGR-CMK) and covalently bound to the active site (HTI, Cat. No. HCXA-BEGR).

[1060] The schematic diagrams of FX zymogen, free FXa, and FXa-SM (Factor Xa+EGR-CMK) are shown in FIG. 1B.

[1061] The non-activatable FX sequence was followed by a GS-linker and biotinylation tag at the C-terminus of the molecule. When co-expressed with the biotin ligase, BirA, in the presence of biotin, the resulting FX molecule carries a single biotin label to enable selections with the Adimab display library.

[1062] Non-activatable FX was recombinantly expressed with BirA in the presence of biotin and purified according to methods known in the art.

[1063] As is the case for FIXa, a tripeptide chloromethylketone (i.e., EGR-CKM) of the sequence EGR can covalently modify the active site of FXa, mimicking a substrate-bound conformation of FXa.

[1064] For the purposes of negative selections, free FXa (HTI, Cat. No. HCXA-0060) and human FXa-SM (HTI, Catalog No. HCXA-EGR and HCXA-BEGR) were purchased from Haematologic Technologies Incorporated (HTI).

[1065] All FX proteins, whether produced in-house or purchased, were buffer exchanged into Tris-buffered saline with 5 mM CaCl₂ as an additive, according to methods known in the art. In this present disclosure, a set of antibodies generated against non-activatable FX, which demonstrate greater binding to non-activatable FX than to FXa (e.g., free FXa or FXa mimic) (in a manner similar to that of FVIIIa), are described.

[1066] As in the case of the above-disclosed anti-FIX antibodies, Adimab expression libraries were screened in accordance with the methods disclosed in U.S. Publication Nos. 20100056386 and 20090181855. Following several iterative rounds of positive selective pressure towards the targeted antigen FX, i.e., non-activatable FX, as well as negative selective pressure against the free FXa or FXa-SM colonies were sequenced to identify unique clones using techniques known in the art. Following antibody selection, more than 800 antibodies were expressed and purified on protein A resin from yeast, according to standard methodology. The experimental triage to identify antibodies that selectively bind to non-activatable FX is outlined in FIG. 2.

[1067] Details of the second step of the triage scheme are provided in the sections entitled “Characterization of Antibody Binding to Target Antigen Factor X (FX)” and “Screening of Antibodies for Biophysical Behavior,” see below. The second step of antibody triage resulted in a set of 94 antibodies against FXn, which may preferentially bind to FXn compared to active FXa (e.g., wild-type FXa or FXa-SM). The amino acid and nucleic acid sequences of the variable regions are provided above. A table of the germline and the CDR of each of the 94 antibodies is depicted in FIGS. 12A, 12B, and 12C.

[1068] Characterization of Antibody Binding to Target Antigen Factor X (FX): To further determine which of the discovered antibodies demonstrate greater binding to FX zymogen than to FXa-SM, the more than 800 antibodies purified from yeast were screened using Bio-Layer Interferometry (BLI) in a monovalent assay format with 200 nM antibody. Non-activatable FX and FXa-SM were obtained from HTI. Free FXa and FXa-SM behaved the same in binding experiments and can be used interchangeably; therefore free FXa results are not shown. Because the data presented for free FXa corresponds to FXa-SM, the observations using FXa-SM are equally applicable to free FXa.

[1069] BLI was performed on the OctetRed94 or the Octet HTX system, according to standard procedure. Briefly, anti-Human IgG Quantitation (AHQ) dip and read biosensors (Pall Fortebio: Catalog No. 18-5005) were equilibrated in TBSFCa. Plates were then transferred to the instrument. A soak step was performed on the instrument, with incubation of the biosensors for 60 seconds in TBSFCa. Then, the biosensors were transferred to wells containing the representative IgG (200 nM in TBSFCa) for 180 seconds. Following this, the biosensors were incubated in TBSFCa for 60 seconds to establish baseline. Then, the biosensors were transferred to wells containing the desired antigen (200 nM in TBSFCa), and association occurred for 90 seconds. Finally, the sensors were transferred to TBSFCa alone for a 90-second incubation. The maximum response value (nm) following the association phase, for either 200 nM FXn or FXa-SM, was plotted for each of the 94 antibodies identified in the selections. Nearly all of the antibodies identified in selections directed towards FXn specificity demonstrated greater binding affinity to FX than to covalently modified FXa (FIG. 13).

[1070] Only BIIB-12-894, BIIB-12-925, BIIB-12-1320, and BIIB-12-1321 displayed greater binding to FXa-SM. It is expected that the antibodies that preferentially bind to FXn compared to activated FX (e.g., free FXa or FXa-SM) preferentially bind to FX zymogen compared to FXa. Therefore, the anti-FIXn antibodies can also be referred to as anti-FXz antibodies. FIG. 14 includes a table listing the apparent affinities for tested antibodies to FXn, according to fitting algorithms provided in the ForteBio Data Analysis 9.0 software.

[1071] Screening of Antibodies for Biophysical Behavior: 94 anti-FXz antibodies were examined by affinity capture self-interaction nanoparticle spectroscopy (AC-SINS), as described for the above-disclosed anti-FIXa antibodies. AC-SINS screens to identify antibodies with poor biophysical properties (e.g., propensity to self-associate) in relation to their peers were performed according to methods described in the literature. See, e.g., Liu et al. (2014) MAbs 6(2):483-92. Antibody was captured on the surface of gold nanoparticles with a starting concentration of 40 pg/ml in a volume of 100 μl and incubated at room temperature for two hours. Following the incubation, the absorbance across a spectrum of wavelengths was determined. In cases of antibody self-association, the inter-particle distance decreases, resulting in higher wavelengths of maximum absorbance. In comparison to internal standards of biophysical behavior, maximum wavelengths of greater than 540 nm are indicative of antibodies that have a propensity to self-interact. FIG. 15 includes a table listing the calculated maximum wavelengths for 94 anti-FXz antibodies, as determined by AC-SINS.

### Example 3

### Construction of Bispecific Antibodies and Evaluation of FVIIIa-Like Activity in a Chromogenic Assay

[1072] Bispecific antibodies consisting of two different Fab arms, one of which preferentially binds to activated FIX (“FXa”) over FIX zymogen (Classes I, II, and III antibodies) and the second of which preferentially binds to FX zymogen over FXa (Class V antibodies) were generated from the individual antibodies described in Examples 1 and 2. Additional bispecific antibodies consisting of a first Fab arm that preferentially binds to FIX zymogen over FIXa (Class IV antibodies) and a second Fab arm that preferentially binds to FXz over FXa (Class V antibodies) or that preferentially binds to FXa over FXz (Class VI antibodies) were generated. Other bispecific antibodies consisting of a first Fab arm that preferentially binds to FIXa over FIXz (Classes I, II, and III antibodies) and a second Fab arm that preferentially binds to FXa over FXz (Class VI antibodies) were also generated.

[1073] The disclosed bispecific antibodies can be generated using methods known in the art without undue experimentation. See, e.g., Kontermann & Brinkmann (2015) Drug Discovery Today 20:838-847 and references cited therein; Spies et al. (2015) Molecular Immunology 67:95-106 and references cited therein; Byrne et al. (2013) Trends in Biotechnology 31:621-632 and references cited therein; Strop et al. (2012) J. Mol. Biol. 420:204-219 and references cited therein; all of which are herein incorporated by reference in their entireties. See also, which are herein incorporated by reference in their entireties.

[1074] The bispecific antibodies either consisted of two different heavy chains and two different light chains, or two different heavy chains and a common light chain in an IgG1-like format. In an additional subset, the bispecific antibodies were of the IgG4 subclass. These bispecific antibodies were screened for their ability to replace the activity of FVIIIa (i.e., ability to mimic FVIIIa), first in a chromogenic assay and second in a plasma-based coagulation assay.

[1075] Assay buffer, phospholipids, CaCl₂, and FXa chromogenic substrate S-2765 were purchased from Diapharma as part of the Chomogenix Coatest SP Factor VIII kit (Cat. No. K824086). All proteins were diluted using a 1X preparation of the assay buffer. Each bispecific antibody (25 μL) was mixed with 20 μL of FX (HTI, Cat. No. HCX-0050) diluted to 750 nM, 20 μL of FIXa (HTI, Cat. No. HCIXA-0050) diluted to 75 nM, and 10 μL of phospholipids at room temperature. After 5 minutes, 25 μL of CaCl₂ was added.

[1076] After an additional 10 minutes, 50 μL of substrate S-2765 was added and the absorbance at 405 nM was read in a Biotek Synergy2 plate reader every 15 seconds for one hour. Initial rates were determined by the change in OD 405 nM over time from the linear portion of each absorbance curve. In the absence of FVIIIa, hFIXa is a poor enzyme that only generates a small amount of FXa, leading to a basal level of FXa substrate cleavage as measured by the change in OD at 405 nm over time (mOD/minute). An increase in the rate of FXa substrate cleavage upon addition of the bispecific antibody indicates its ability to facilitate the activation of FX by FIXa (thereby replacing FVIIIa-like function) in a FXa generation assay. Using this method, 202 antibodies were identified that mimicked FVIIIa activity, i.e., have a rate of FXa substrate cleavage at least three standard deviations above the mean basal rate in the absence of the added bispecific antibody (5.88 mOD/minute).

[1077] The change in OD over time in the absence of bispecific antibody (baseline), as well as the change in OD over time for 3 different bispecific antibodies: BIIB-9-484/BIIB-12-915, BIIB-9-619/BIIB-12-925 and BIIB-9-578/BIIB-12-917, which are capable of replacing FVIIIa-like function, is shown in FIGS. 16A-16D.

[1078] Rates for all of the 202 IgG1 bispecific antibodies capable of replacing FVIIIa-like function are shown in FIG. 16A-16D. Rates for a subset of these antibodies in the IgG4-hinge format are shown in in FIG. 17.

TABLE 2
Exemplary Bispecific Antibodies

| | | VH | VL |
|---|---|---|---|
| | | SEQ | SEQ |
| Bispecific | | ID | ID |
| Ab No. | Description | NO. | NO. |
| 1 | BIIB-9-484 | 31 | 221 |
| | BIIB-12-1288 | 467 | 655 |
| 2 | BIIB-9-578 | 185 | 371 |
| | BIIB-12-1288 | 467 | 655 |
| 3 | BIIB-9-484 | 31 | 221 |
| | BIIB-12-1289 | 469 | 657 |
| 4 | BIIB-9-484 | 31 | 221 |
| | BIIB-12-1290 | 471 | 659 |
| 5 | BIIB-9-578 | 185 | 371 |
| | BIIB-12-1290 | 471 | 659 |
| 6 | BIIB-9-484 | 31 | 221 |
| | BIIB-12-1291 | 473 | 661 |
| 7 | BIIB-9-484 | 31 | 221 |
| | BIIB-12-1292 | 475 | 663 |
| 8 | BIIB-9-484 | 31 | 221 |
| | BIIB-12-1293 | 477 | 665 |
| 9 | BIIB-9-484 | 31 | 221 |
| | BIIB-12-1294 | 479 | 667 |
| 10 | BIIB-9-578 | 185 | 371 |
| | BIIB-12-1294 | 479 | 667 |
| 11 | BIIB-9-484 | 31 | 221 |
| | BIIB-12-1295 | 481 | 669 |
| 12 | BIIB-9-578 | 185 | 371 |
| | BIIB-12-1295 | 481 | 669 |
| 13 | BIIB-9-484 | 31 | 221 |
| | BIIB-12-1296 | 483 | 671 |
| 14 | BIIB-9-578 | 185 | 371 |
| | BIIB-12-1296 | 483 | 671 |
| 15 | BIIB-9-619 | 45 | 235 |
| | BIIB-12-1296 | 483 | 671 |
| 16 | BIIB-9-484 | 31 | 221 |
| | BIIB-12-1297 | 485 | 673 |
| 17 | BIIB-9-578 | 185 | 371 |
| | BIIB-12-1297 | 485 | 673 |
| 18 | BIIB-9-484 | 31 | 221 |
| | BIIB-12-1298 | 487 | 675 |
| 19 | BIIB-9-578 | 185 | 371 |
| | BIIB-12-1298 | 487 | 675 |
| 20 | BIIB-9-484 | 31 | 221 |
| | BIIB-12-1299 | 489 | 677 |
| 21 | BIIB-9-578 | 185 | 371 |
| | BIIB-12-1299 | 489 | 677 |
| 22 | BIIB-9-484 | 31 | 221 |
| | BIIB-12-1300 | 491 | 679 |
| 23 | BIIB-9-484 | 31 | 221 |
| | BIIB-12-1301 | 493 | 681 |
| 24 | BIIB-9-484 | 31 | 221 |
| | BIIB-12-1302 | 495 | 683 |
| 25 | BIIB-9-425 | 17 | 207 |
| | BIIB-12-1303 | 497 | 685 |
| 26 | BIIB-9-484 | 31 | 221 |
| | BIIB-12-1303 | 497 | 685 |
| 27 | BIIB-9-578 | 185 | 371 |
| | BIIB-12-1303 | 497 | 685 |
| 28 | BIIB-9-484 | 31 | 221 |
| | BIIB-12-1304 | 499 | 687 |
| 29 | BIIB-9-578 | 185 | 371 |
| | BIIB-12-1304 | 499 | 687 |
| 30 | BIIB-9-484 | 31 | 221 |
| | BIIB-12-1305 | 501 | 689 |
| 31 | BIIB-9-578 | 185 | 371 |
| | BIIB-12-1305 | 501 | 689 |
| 32 | BIIB-9-484 | 31 | 221 |
| | BIIB-12-1306 | 503 | 691 |
| 33 | BIIB-9-578 | 185 | 371 |
| | BIIB-12-1306 | 503 | 691 |
| 34 | BIIB-9-484 | 31 | 221 |
| | BIIB-12-1307 | 505 | 693 |
| 35 | BIIB-9-578 | 185 | 371 |
| | BIIB-12-1307 | 505 | 693 |
| 36 | BIIB-9-484 | 31 | 221 |
| | BIIB-12-1308 | 507 | 695 |
| 37 | BIIB-9-578 | 185 | 371 |
| | BIIB-12-1308 | 507 | 695 |
| 38 | BIIB-9-484 | 31 | 221 |
| | BIIB-12-1309 | 509 | 697 |
| 39 | BIIB-9-578 | 185 | 371 |
| | BIIB-12-1309 | 509 | 697 |
| 40 | BIIB-9-484 | 31 | 221 |
| | BIIB-12-1310 | 511 | 699 |
| 41 | BIIB-9-578 | 185 | 371 |
| | BIIB-12-1310 | 511 | 699 |
| 42 | BIIB-9-484 | 31 | 221 |
| | BIIB-12-1311 | 513 | 701 |
| 43 | BIIB-9-578 | 185 | 371 |
| | BIIB-12-1311 | 513 | 701 |
| 44 | BIIB-9-484 | 31 | 221 |
| | BIIB-12-1312 | 515 | 703 |
| 45 | BIIB-9-578 | 185 | 371 |
| | BIIB-12-1312 | 515 | 703 |
| 46 | BIIB-9-484 | 31 | 221 |
| | BIIB-12-1313 | 517 | 705 |
| 47 | BIIB-9-484 | 31 | 221 |
| | BIIB-12-1314 | 519 | 707 |
| 48 | BIIB-9-578 | 185 | 371 |
| | BIIB-12-1314 | 519 | 707 |
| 49 | BIIB-9-484 | 31 | 221 |
| | BIIB-12-1315 | 521 | 709 |
| 50 | BIIB-9-578 | 185 | 371 |
| | BIIB-12-1315 | 521 | 709 |
| 51 | BIIB-9-480 | 9 | 199 |
| | BIIB-12-1316 | 523 | 711 |
| 52 | BIIB-9-484 | 31 | 221 |
| | BIIB-12-1316 | 523 | 711 |
| 53 | BIIB-9-469 | 33 | 223 |
| | BIIB-12-1316 | 523 | 711 |
| 54 | BIIB-9-578 | 185 | 371 |
| | BIIB-12-1316 | 523 | 711 |
| 55 | BIIB-9-484 | 31 | 221 |
| | BIIB-12-1318 | 527 | 715 |
| 56 | BIIB-9-484 | 31 | 221 |
| | BIIB-12-1319 | 529 | 717 |
| 57 | BIIB-9-578 | 185 | 371 |
| | BIIB-12-1319 | 529 | 717 |
| 58 | BIIB-9-484 | 31 | 221 |
| | BIIB-12-1320 | 561 | 749 |
| 59 | BIIB-9-425 | 17 | 207 |
| | BIIB-12-1321 | 563 | 751 |
| 60 | BIIB-9-484 | 31 | 221 |
| | BIIB-12-1321 | 563 | 751 |
| 61 | BIIB-9-484 | 31 | 221 |
| | BIIB12-1322 | 531 | 719 |
| 62 | BIIB-9-484 | 31 | 221 |
| | BIIB-12-1323 | 533 | 721 |
| 63 | BIIB-9-484 | 31 | 221 |
| | BIIB-12-1325 | 537 | 725 |
| 64 | BIIB-9-578 | 185 | 371 |
| | BIIB-12-1325 | 537 | 725 |
| 65 | BIIB-9-484 | 31 | 221 |
| | BIIB-12-1326 | 539 | 727 |
| 66 | BIIB-9-578 | 185 | 371 |
| | BIIB-12-1326 | 539 | 727 |
| 67 | BIIB-9-484 | 31 | 221 |
| | BIIB-12-1327 | 541 | 729 |
| 68 | BIIB-9-578 | 185 | 371 |
| | BIIB-12-1327 | 543 | 731 |
| 69 | BIIB-9-484 | 31 | 221 |
| | BIIB-12-1329 | 545 | 733 |
| 70 | BIIB-9-484 | 31 | 221 |
| | BIIB-12-1330 | 547 | 735 |
| 71 | BIIB-9-631 | 187 | 373 |
| | BIIB-12-1330 | 547 | 735 |
| 72 | BIIB-9-484 | 31 | 221 |
| | BIIB-12-1331 | 549 | 737 |
| 73 | BIIB-9-484 | 31 | 221 |
| | BIIB-12-1332 | 551 | 739 |
| 74 | BIIB-9-484 | 31 | 221 |
| | BIIB-12-1333 | 553 | 741 |
| 75 | BIIB-9-416 | 93 | 279 |
| | BIIB-12-1334 | 555 | 743 |
| 76 | BIIB-9-484 | 31 | 221 |
| | BIIB-12-1334 | 555 | 743 |
| 77 | BIIB-9-578 | 185 | 371 |
| | BIIB-12-1334 | 555 | 743 |
| 78 | BIIB-9-484 | 31 | 221 |
| | BIIB-12-891 | 377 | 565 |
| 79 | BIIB-9-484 | 31 | 221 |
| | BIIB-12-892 | 379 | 567 |
| 80 | BIIB-9-484 | 31 | 221 |
| | BIIB-12-893 | 381 | 569 |
| 81 | BIIB-9-484 | 31 | 221 |
| | BIIB-12-894 | 557 | 745 |
| 82 | BIIB-9-578 | 185 | 371 |
| | BIIB-12-894 | 557 | 745 |
| 83 | BIIB-9-484 | 31 | 221 |
| | BIIB-12-895 | 383 | 571 |
| 84 | BIIB-9-484 | 31 | 221 |
| | BIIB-12-896 | 385 | 573 |
| 85 | BIIB-9-484 | 31 | 221 |
| | BIIB-12-897 | 387 | 575 |
| 86 | BIIB-9-578 | 185 | 371 |
| | BIIB-12-897 | 387 | 575 |
| 87 | BIIB-9-619 | 45 | 235 |
| | BIIB-12-897 | 387 | 575 |
| 88 | BIIB-9-628 | 113 | 299 |
| | BIIB-12-897 | 387 | 575 |
| 89 | BIIB-9-484 | 31 | 221 |
| | BIIB-12-898 | 389 | 577 |
| 90 | BIIB-9-484 | 31 | 221 |
| | BIIB-12-899 | 391 | 579 |
| 91 | BIIB-9-484 | 31 | 221 |
| | BIIB-12-900 | 393 | 581 |
| 92 | BIIB-9-484 | 31 | 221 |
| | BIIB-12-901 | 395 | 583 |
| 93 | BIIB-9-484 | 31 | 221 |
| | BIIB-12-902 | 397 | 585 |
| 94 | BIIB-9-484 | 31 | 221 |
| | BIIB-12-903 | 399 | 587 |
| 95 | BIIB-9-578 | 185 | 371 |
| | BIIB-12-903 | 399 | 587 |
| 96 | BIIB-9-619 | 45 | 235 |
| | BIIB-12-903 | 399 | 587 |
| 97 | BIIB-9-484 | 31 | 221 |
| | BIIB-12-904 | 401 | 589 |
| 98 | BIIB-9-484 | 31 | 221 |
| | BIIB-12-905 | 403 | 591 |
| 99 | BIIB-9-578 | 185 | 371 |
| | BIIB-12-905 | 403 | 591 |
| 100 | BIIB-9-484 | 31 | 221 |
| | BIIB-12-906 | 405 | 593 |
| 101 | BIIB-9-578 | 185 | 371 |
| | BIIB-12-906 | 405 | 593 |
| 102 | BIIB-9-619 | 45 | 235 |
| | BIIB-12-906 | 405 | 593 |
| 103 | BIIB-9-484 | 31 | 221 |
| | BIIB-12-907 | 407 | 595 |
| 104 | BIIB-9-484 | 31 | 221 |
| | BIIB-12-908 | 409 | 597 |
| 105 | BIIB-9-484 | 31 | 221 |
| | BIIB-12-909 | 411 | 599 |
| 106 | BIIB-9-484 | 31 | 221 |
| | BIIB-12-910 | 413 | 601 |
| 107 | BIIB-9-484 | 31 | 221 |
| | BIIB-12-911 | 415 | 603 |
| 108 | BIIB-9-484 | 31 | 221 |
| | BIIB-12-912 | 417 | 605 |
| 109 | BIIB-9-484 | 31 | 221 |
| | BIIB-12-913 | 419 | 607 |
| 110 | BIIB-9-484 | 31 | 221 |
| | BIIB-12-914 | 421 | 609 |
| 111 | BIIB-9-484 | 31 | 221 |
| | BIIB-12-915 | 423 | 611 |
| 112 | BIIB-9-578 | 185 | 371 |
| | BIIB-12-915 | 423 | 611 |
| 113 | BIIB-9-619 | 45 | 235 |
| | BIIB-12-915 | 423 | 611 |
| 114 | BIIB-9-484 | 31 | 221 |
| | BIIB-12-916 | 425 | 613 |
| 115 | BIIB-9-578 | 185 | 371 |
| | BIIB-12-916 | 425 | 613 |
| 116 | BIIB-9-607 | 99 | 285 |
| | BIIB-12-917 | 427 | 615 |
| 117 | BIIB-9-484 | 31 | 221 |
| | BIIB-12-917 | 427 | 615 |
| 118 | BIIB-9-578 | 185 | 371 |
| | BIIB-12-917 | 427 | 615 |
| 119 | BIIB-9-619 | 45 | 235 |
| | BIIB-12-917 | 427 | 615 |
| 120 | BIIB-9-484 | 31 | 221 |
| | BIIB-12-918 | 429 | 617 |
| 121 | BIIB-9-578 | 185 | 371 |
| | BIIB-12-918 | 429 | 617 |
| 122 | BIIB-9-484 | 31 | 221 |
| | BIIB-12-920 | 433 | 621 |
| 123 | BIIB-9-484 | 31 | 221 |
| | BIIB-12-921 | 435 | 623 |
| 124 | BIIB-9-484 | 31 | 221 |
| | BIIB-12-922 | 437 | 625 |
| 125 | BIIB-9-484 | 31 | 221 |
| | BIIB-12-923 | 439 | 627 |
| 126 | BIIB-9-578 | 185 | 371 |
| | BIIB-12-923 | 439 | 627 |
| 127 | BIIB-9-484 | 31 | 221 |
| | BIIB-12-924 | 441 | 629 |
| 128 | BIIB-9-578 | 185 | 371 |
| | BIIB-12-924 | 441 | 629 |
| 129 | BIIB-9-607 | 99 | 285 |
| | BIIB-12-925 | 559 | 747 |
| 130 | BIIB-9-439 | 105 | 291 |
| | BIIB-12-925 | 559 | 747 |
| 131 | BIIB-9-564 | 29 | 219 |
| | BIIB-12-925 | 559 | 747 |
| 132 | BIIB-9-484 | 31 | 221 |
| | BIIB-12-925 | 559 | 747 |
| 133 | BIIB-9-578 | 185 | 371 |
| | BIIB-12-925 | 559 | 747 |
| 134 | BIIB-9-615 | 111 | 297 |
| | BIIB-12-925 | 559 | 747 |
| 135 | BIIB-9-619 | 45 | 235 |
| | BIIB-12-925 | 559 | 747 |
| 136 | BIIB-9-628 | 113 | 299 |
| | BIIB-12-925 | 559 | 747 |
| 137 | BIIB-9-484 | 31 | 221 |
| | BIIB-12-926 | 443 | 631 |
| 138 | BIIB-9-484 | 31 | 221 |
| | BIIB-12-927 | 445 | 633 |
| 139 | BIIB-9-484 | 31 | 221 |
| | BIIB-12-927 | 445 | 633 |
| 140 | BIIB-9-484 | 31 | 221 |
| | BIIB-12-929 | 449 | 637 |
| 141 | BIIB-9-484 | 31 | 221 |
| | BIIB-12-930 | 451 | 639 |
| 142 | BIIB-9-484 | 31 | 221 |
| | BIIB-12-931 | 453 | 641 |
| 143 | BIIB-9-484 | 31 | 221 |
| | BIIB-12-933 | 457 | 645 |
| 144 | BIIB-9-484 | 31 | 221 |
| | BIIB-12-936 | 463 | 651 |
| 145 | BIIB-9-484 | 31 | 221 |
| | BIIB-12-937 | 465 | 653 |
| 146 | BIIB-9-1284 | 175 | 361 |
| | BIIB-12-892 | 379 | 567 |
| 147 | BIIB-9-451 | 53 | 243 |
| | BIIB-12-907 | 407 | 595 |
| 148 | BIIB-9-1265 | 137 | 323 |
| | BIIB-12-908 | 409 | 597 |
| 149 | BIIB-9-1275 | 157 | 343 |
| | BIIB-12-908 | 409 | 597 |
| 150 | BIIB-9-419 | 51 | 241 |
| | BIIB-12-910 | 413 | 601 |
| 151 | BIIB-9-473 | 55 | 245 |
| | BIIB-12-910 | 413 | 601 |
| 152 | BIIB-9-573 | 59 | 249 |
| | BIIB-12-910 | 413 | 601 |
| 153 | BIIB-9-581 | 63 | 253 |
| | BIIB-12-910 | 413 | 601 |
| 154 | BIIB-9-582 | 65 | 255 |
| | BIIB-12-910 | 413 | 601 |
| 155 | BIIB-9-592 | 73 | 263 |
| | BIIB-12-910 | 413 | 601 |
| 156 | BIIB-9-608 | 77 | 267 |
| | BIIB-12-910 | 413 | 601 |
| 157 | BIIB-9-612 | 189 | 375 |
| | BIIB-12-910 | 413 | 601 |
| 158 | BIIB-9-616 | 79 | 269 |
| | BIIB-12-910 | 413 | 601 |
| 159 | BIIB-9-1265 | 137 | 323 |
| | BIIB-12-910 | 413 | 601 |
| 160 | BIIB-9-1268 | 143 | 329 |
| | BIIB-12-910 | 413 | 601 |
| 161 | BIIB-9-1269 | 145 | 331 |
| | BIIB-12-910 | 413 | 601 |
| 162 | BIIB-9-1272 | 151 | 337 |
| | BIIB-12-910 | 413 | 601 |
| 163 | BIIB-9-1273 | 153 | 339 |
| | BIIB-12-910 | 413 | 601 |
| 164 | BIIB-9-1274 | 155 | 341 |
| | BIIB-12-910 | 413 | 601 |
| 165 | BIIB-9-1275 | 157 | 343 |
| | BIIB-12-910 | 413 | 601 |
| 166 | BIIB-9-1276 | 159 | 345 |
| | BIIB-12-910 | 413 | 601 |
| 167 | BIIB-9-1279 | 165 | 351 |
| | BIIB-12-910 | 413 | 601 |
| 168 | BIIB-9-1282 | 171 | 357 |
| | BIIB-12-910 | 413 | 601 |
| 169 | BIIB-9-1284 | 175 | 361 |
| | BIIB-12-910 | 413 | 601 |
| 170 | BIIB-9-1285 | 177 | 363 |
| | BIIB-12-910 | 413 | 601 |
| 171 | BIIB-9-1278 | 163 | 349 |
| | BIIB-12-913 | 419 | 607 |
| 172 | BIIB-9-1285 | 177 | 363 |
| | BIIB-12-913 | 419 | 607 |
| 173 | BIIB-9-590 | 71 | 261 |
| | BIIB-12-914 | 421 | 609 |
| 174 | BIIB-9-612 | 189 | 375 |
| | BIIB-12-921 | 435 | 623 |
| 175 | BIIB-9-621 | 81 | 271 |
| | BIIB-12-925 | 559 | 747 |
| 176 | BIIB-9-1265 | 137 | 323 |
| | BIIB-12-925 | 559 | 747 |
| 177 | BIIB-9-1275 | 157 | 343 |
| | BIIB-12-925 | 559 | 747 |
| 178 | BIIB-9-1279 | 165 | 351 |
| | BIIB-12-925 | 559 | 747 |
| 179 | BIIB-9-1265 | 137 | 323 |
| | BIIB-12-1288 | 467 | 655 |
| 180 | BIIB-9-1275 | 157 | 343 |
| | BIIB-12-1288 | 467 | 655 |
| 181 | BIIB-9-451 | 53 | 243 |
| | BIIB-12-1292 | 475 | 663 |
| 182 | BIIB-9-573 | 59 | 249 |
| | BIIB-12-1292 | 475 | 663 |
| 183 | BIIB-9-581 | 63 | 253 |
| | BIIB-12-1292 | 475 | 663 |
| 184 | BIIB-9-582 | 65 | 255 |
| | BIIB-12-1292 | 475 | 663 |
| 185 | BIIB-9-585 | 67 | 257 |
| | BIIB-12-1292 | 475 | 663 |
| 186 | BIIB-9-608 | 77 | 267 |
| | BIIB-12-1294 | 479 | 667 |
| 187 | BIIB-9-1265 | 137 | 323 |
| | BIIB-12-1294 | 479 | 667 |
| 188 | BIIB-9-1265 | 137 | 323 |
| | BIIB-12-1297 | 485 | 673 |
| 189 | BIIB-9-608 | 77 | 267 |
| | BIIB-12-1300 | 491 | 679 |
| 190 | BIIB-9-1265 | 137 | 323 |
| | BIIB-12-1300 | 491 | 679 |
| 191 | BIIB-9-608 | 77 | 267 |
| | BIIB-12-1301 | 493 | 681 |
| 192 | BIIB-9-1265 | 137 | 323 |
| | BIIB-12-1301 | 493 | 681 |
| 193 | BIIB-9-1265 | 137 | 323 |
| | BIIB-12-1312 | 515 | 703 |
| 194 | BIIB-9-433 | 127 | 313 |
| | BIIB-12-1314 | 519 | 707 |
| 195 | BIIB-9-1265 | 137 | 323 |
| | BIIB-12-1314 | 519 | 707 |
| 196 | BIIB-9-1275 | 157 | 343 |
| | BIIB-12-1314 | 519 | 707 |
| 197 | BIIB-9-1276 | 159 | 345 |
| | BIIB-12-1314 | 519 | 707 |
| 198 | BIIB-9-1276 | 159 | 345 |
| | BIIB-12-1315 | 521 | 709 |
| 199 | BIIB-9-1268 | 143 | 329 |
| | BIIB-12-1318 | 527 | 715 |
| 200 | BIIB-9-1265 | 137 | 323 |
| | BIIB-12-1319 | 529 | 717 |
| 201 | BIIB-9-1284 | 175 | 361 |
| | BIIB-12-1327 | 541 | 729 |
| 202 | BIIB-9-1273 | 153 | 339 |
| | BIIB-12-1334 | 555 | 743 |

### Example 4

### Assessment of Bispecific Antibodies in Plasma-Based Coagulation Assays

[1079] Bispecific antibodies that were able to replace and/or mimic FVIIIa activity in a chromogenic assay were further tested for their ability to replace FVIIIa-like activity in a one stage clotting assay in plasma. Only those bispecific antibodies displaying the greatest activity in the chromogenic assay described above were selected for this study.

[1080] Bispecific antibodies (5 μL) at varying concentrations were mixed with 50 μL of FVIII-deficient plasma (Siemens) for 60 seconds. To activate the reaction, 50 μL of Actin FSL Ellagic Acid was added to the reaction mixture for 240 seconds, followed by 50 μL of CaCl₂. Time to clot was measured for 300 seconds by optical detection using a Sysmex CA-1500 system (Siemens). A decrease in clotting time in the presence of a bispecific antibody, specifically a decrease in clotting time beyond baseline to approximately 126 seconds and a dose response indicating a decrease in clotting time, is considered indicative of the ability of the antibody to replace FVIIIa function and to facilitate clot formation.

[1081] FIG. 19 shows an example of three such bispecific antibodies: BIIB-9-484/BIIB-12-917, BIIB-9-484/BIIB-12-915, and BIIB-9-484/BIIB-12-1306. To show that the FVIIIa-like activity results from the bispecific format of the antibody, the same experiment was performed with either an anti-FIXa and anti-FX homodimer alone, or as a mixed population of homodimers compared to the bispecific antibody. Results for the BIIB-9-484 and BIIB-12-917 pair are shown in FIG. 20.

[1082] To ensure that the bispecific activity observed in FXa generation and plasma based coagulation assays involved simultaneous association of each of the target antigens, a BLI-based experiment was performed on the ForteBio HTX system using streptavidin dip and read biosensors (Pall ForteBio; Catalog No. 18-5021). Following incubation in Tris-buffered saline supplemented with 0.1% bovine serum albumin and 5 mM CaCl₂ (referred to as buffer in FIG. 21), the biosensors were then incubated with biotinylated FIXa-SM produced in-house. Subsequently, the biosensors were transferred to wells containing 100 nM of BIIB-9-484/BIIB-12-917. Finally, the same biosensors were incubated with 200 nM of non-biotinylated FX (non-activated Factor X). As demonstrated in the disclosure herein, the bispecific BIIB-9-484/BIIB-12-917 was capable of associating with each of the target antigens, presented as an example in FIG. 21. This is supportive of, and in agreement with, its observed functional activity.

### Example 5

### Engineering and Optimization of Bispecific Activity

[1083] To determine whether bispecific activity could be improved through engineering of an antibody:antigen interaction, the CDR1 and CDR2 regions of the BIIB-9-484 VH were modified to introduce amino acid diversity into the germline sequence. A library of 10⁶ sequence derivatives of BIIB-9-484 was then introduced into the Adimab platform.

[1084] To identify derivatives with improved affinity to FIXa (i.e., free FXa) and FIXa-SM relative to non-activatable FIX, expression libraries were subjected to several iterative rounds of selection with selective pressure applied towards higher affinity clones in accordance with methods disclosed in U.S. Publication Nos. 20100056386 and 20090181855, which are herein incorporated by reference in their entireties. See, also, Van Deventer and Wittrup (2014) Methods Mol. Biol. 1319:3-36; Chao et al. (2006), Nature Protocols 1(2):755-768; Feldhaus et al. (2003) Nature Biotechnology 21(2):163-170; Boder and Wittrup (1997) Nature Biotechnology 15(6):553-557, all of which are herein incorporated by reference in their entireties.

[1085] Subsequently, colonies were sequenced to identify unique derivatives, according to methods known in the art. This procedure identified at least 76 unique VH sequences. 76 antibodies were expressed and purified from yeast by protein A purification, according to standard procedures in the art.

[1086] 76 unique derivative antibodies from the parental BIIB-9-484 were then re-screened for improved binding to target antigen, free FIXa (HTI) or FIXa-SM (HTI), this time using BLI in a monovalent assay format with 200 nM antibody. BLI was performed on the Octet HTX system according to manufacturer's procedures. Briefly, anti-Human IgG Quantitation (AHQ) dip and read biosensors (Pall Fortebio: Cat. No. 18-5005) were equilibrated in TBSFCa. Plates were then transferred to the instrument. A soak step was performed on the instrument, with incubation of the biosensors for 60 seconds in TBSFCa. Then, the biosensors were transferred to wells containing the representative IgG (100 nM in TBSFCa) for 180 seconds. Following this, the biosensors were incubated in TBSFCa for 60 seconds to establish baseline. Then, the biosensors were transferred to wells containing the desired antigen (10 nM in TBSFCa) and association occurred for 90-180 seconds. Finally, the sensors were transferred to TBSFCa alone for 180 second incubation.

[1087] At least two derivatives of BIIB-9-484, named BIIB-9-1335 and BIIB-9-1336, respectively, demonstrated significantly improved binding to target antigen relative to the parent at a concentration of 10 nM antibody. Deviations from the BIIB-9-484 CDR1 and CDR2 regions of the heavy chain are noted in FIG. 22A. BLI binding profiles of the two derivatives are disclosed, exhibiting the stronger binding to target antigen (i.e., free FIXa) observed (FIG. 22B-22D). The amino acid and nucleic acid sequences of the modified VH regions of BIIB-9-484, BIIB-9-1335, and BIIB-9-1336 are provided below.

[1088] The effect of increasing the affinity of the anti-FIXa arm of the bispecific was tested by comparing the ability of each bispecific (containing either the parent anti-FIXa arm or the affinity matured anti-FIXa arm with a constant anti-FX arm) to replace FVIIIa activity in a one stage clotting assay. Experiments were performed as explained in Example 4. One such example is shown in FIG. 23, in which the anti-FX arm of the bispecific (BIIB-12-917) was paired with either the BIIB-9-484 anti-FIXa arm, or with the affinity matured daughters of the anti-FIXa arm (BIIB-9-1335 and BIIB-9-1336) (FIG. 23). Further decreases in the clotting time of the bispecific antibodies containing the affinity matured anti-FIXa arms versus the parent anti-FIXa arm indicate that increasing the affinity of the anti-FIXa arm results in an increase in activity of the resulting bispecific antibody.

### Example 6

### Benchmarking FVIIIa-Mimetic Bispecific Antibodies Against FVIII for Hemophilia A Treatment

[1089] Using a number of activity assays, a reference bispecific antibody (bsAb) and a bispecific antibody of the present disclosure, BS-027125, were compared to recombinant FVIII (rFVIII). The bsAb BS-027125 comprises BIIB-9-1336 and BIIB-12-917. The reference bispecific antibody has a sequence identical to ACE910/emicizumab (“emicizumab biosimilar”); ACE910 is a recombinant humanized bispecific antibody that binds to activated factor IX and factor X and mimics the cofactor function of factor VIII (FVIII). ACE910 is disclosed in U.S. Pat. No. 8,062,635, which is incorporated herein by reference. Emicizumab biosimilar and BS-027125 are depicted in FIG. 24A and FIG. 24B, respectively. Emicizumab biosimilar binds to each of factor IX zymogen, factor IXa, factor X zymogen, and factor Xa with a K_{d} of approximately 1 μM (FIG. 24A). BS-027125 also binds to factor IX zymogen (K_{D}=8 nM), factor IXa (K_{D}=2 nM), and factor X zymogen (K_{D}=20 nM), but does not bind to factor Xa (FIG. 24B). Accordingly, BS-027125 has a higher affinity and greater specificity for activated factor IX and/or factor X zymogen than emicizumab biosimilar.

[1090] BS-027125 was designed as disclosed above using the Adimab in vitro yeast presentation platform with FACS-based selection followed by affinity maturation. The initial pool of bsAbs was generated by formatting the >200 unique antibodies specific for FIXa and the >250 unique antibodies specific for FX that were identified using Adimab into bsAbs. BS-027125's parent antibody, BS-027025, had the highest FVIIIa-like activity among this initial pool of bsAbs maintaining significant activity in a one-stage clotting assay. As depicted in FIG. 25, BS-027025 significantly shortened the clotting time, coming close to the activity of recombinant Factor VIII in the same assay. BS-027025 bound to factor XI zymogen (K_{D}=370 nM), factor IXa (K_{D}=67 nM), factor IXa-LTR (K_{D}=10.5 nM), and factor X zynmogen (K_{D}=20 nM), but not factor IXa as shown in Table 3.

TABLE 3

| Factor | BS-025 |
|---|---|
| Factor IX zymogen | 370 nM |
| Factor IXa | 67 nM |
| Factor IXa-LTR | 10.5 nM |
| | BS-027 |
| Factor X zymogen | 20 nM |
| Factor Xa | Not detected |

[1091] Affinity maturation of the anti-FIXa arm of BS-027025 led to the bsAb BS-027125. Increasing the affinity of the anti-FIXa arm (BS-025 to BS-125) increased the FXa generation rate of the resulting bispecific antibody, particularly when paired with BS-027 or BS-007 components in the bispecific antibody. (data not shown) Further testing indicated that BS-027125 achieved approximately 90% FVIIIa-like activity as determined by one-stage clotting assay (FIG. 26).

[1092] Activity of BS-027125, its respective bivalent homodimers, and rFVIII was measured by chromogenic factor Xa (FXa) generation assay (FIG. 27), thrombin generation assay triggered with factor XIa (FIGS. 28A and 28B), and activated partial thromboplastin time (aPTT) triggered with Actin FSL (FIG. 26).

[1093] Whereas the reference bsAb was highly active across all assays, the concentration at which it achieved peak activity was disparate between the assays. BS-027125 also displayed activity in all assays, and was highly active in aPTT. For both bsAbs, lag time and peak height in thrombin generation assay correlated with different levels of rFVIII activity. Both the reference bsAb bivalent homodimers exhibited significant activity in several assays, while only the BS-027125 FIXa bivalent homodimer retained moderate activity in the FXa generation assay. As expected, rFVIII lost all activity in the absence of phospholipids in FXa generation assay. BS-027125 also showed minimal phospholipid-independent activity. In contrast, the reference bsAb had very significant activity in the absence of phospholipids.

### Example 7

### Effect of Phospholipid Composition on Activity of Bispecific FVIIIa Mimetic Antibodies

[1094] As part of the tenase complex, activated factor VIII (FVIIIa) binds to exposed phosphatidylserine (PS) on cell membranes and assembles with activated factor IXa and factor X. It has been shown that FVIIIa binds preferentially to phospholipids containing both PS (phosphatidylserines) and phosphatidylethanolamine (PE). The presence of phosphatidylethanolamine (PE) in phosphatidylcholine (PC) phospholipid vesicles has been shown to reduce the amount of PS needed for optimal clotting factor activity whereas vesicles composed of only PS and PC require higher levels of PS for optimal activity. Recently, a FVIIIa mimetic bispecific antibody (emicizumab) has been developed as a potential treatment for hemophilia A patients with and without inhibitors. The FVIII-mimetic bispecific antibody BS-027125 has improved target specificity over emicizumab. Given that phospholipid composition influences tenase activity and that antibodies do not directly bind phospholipids, it is unclear whether FVIIIa mimetic antibodies will show similar phospholipid preferences.

[1095] The effect of varying phospholipid compositions and concentrations on the activity of the reference bsAb shown in Example 6, a bispecific antibody of the present disclosure, BS-027125, and recombinant FVIII (rFVIII) was compared.

[1096] The procoagulant activity of the reference bsAb, BS-027125 and rFVIII were assessed by a thrombin generation assay triggered with factor XIa. Unilamellar phospholipid vesicles were prepared by extrusion, as described in Mui B, et al. Methods Enzymol. 2003. Synthetic phospholipid vesicles tested were composed of either PS(phosphatidylserine)/PE(phosphatidylethanolamine)/PC(phosphatidylcholine) (20%/40%/40%) or PS/PC (20%/80%).

[1097] As expected, rFVIII activity was ˜2.5-fold higher on PE-containing phospholipids and activity was lost on both phospholipids when limiting or in extreme excess. Notably, whereas the reference bsAb activity was similar on both phospholipids, BS-027125 was ˜3 fold more active on PE-containing phospholipids. The phospholipid concentration that supported peak activity was higher for the reference bsAb and BS-027125 than for rFVIII. These results suggest the reference bsAb and BS-027125 function via different mechanisms.

[1098] For rFVIII and BS-027125, the trend of increased activity on PE-containing phospholipids is maintained between FXa generation assay and thrombin generation assay. See FIG. 29. Emi-bsim, however, had increased activity in FXa generation, but not in thrombin generation. See FIG. 30. The different relative activities of rFVIII and FVIIIa mimetic bispecific antibodies on different phospholipid surfaces complicate direct comparisons between these molecules and highlight the influence of assay design when benchmarking the activity of FVIIIa mimetic bispecific antibodies to rFVIII. These data further suggest differences in mechanism of action between Emi-bsim and BS-027125.

### Example 8

### Epitope Binning of Anti-FIXa Antibodies

[1099] To determine whether the various pairs of anti-FIXa antibodies bind to unique sites, we performed a binning experiment using biolayer interferometry on the Octet HTX system following manufacturer's instruction. Briefly, anti-Human IgG Quantitation (AHQ) dip and read biosensors (Pall Fortebio: Catalog #18-5005) were equilibrated in TBSFCa for 60 seconds. Subsequently, the first antibody (at 200 nM in TBSFCa) was loaded onto the biosensor tip over 180 seconds, followed by a baseline step in buffer alone for 60 seconds.

[1100] Any free binding sites remaining on the probe were blocked with non-specific IgG's for 180 seconds, followed by another baseline step in buffer alone for 60 seconds. Next, FIXa+SM (100 nM in TBSFCa) was allowed to bind to the anti-FIXa antibody-loaded probes for 90 seconds. Finally, complex between the first antibody and FIXa+SM was exposed to the second anti-FIXa antibody (at 200 nM in TBSFCa).

[1101] A further increase in signal indicated that antibody 1 and antibody 2 could bind to the antigen simultaneously and that they were non-competitive, meaning that they did not fall into the same bin (FIG. 31A). However, if no further increase in signal was observed, this indicated that antibody 1 and antibody 2 could not bind to the antigen simultaneously and therefore they were said to compete, meaning that they fell into the same in (FIG. 31B).

[1102] If simultaneous binding of antibody 1 and 2 was only observed in one direction (i.e. antibody1-antigen-antibody2 versus antibody 2-antigen-antibody 1), this was deemed a uni-directional conflict.

[1103] A subset of 48 antibodies were chosen for this analysis and the results are summarized in FIG. 31C. A few antibodies were dropped from the analysis owing to errors in data collection or because the given antibody did not bind to FIXa+SM (e.g, because it was specific for FIXa).

[1104] A binning network was subjected to node analysis to provide a visual representation of how closely related each of the FIXa antibodies are with regard to their binning profiles (FIG. 31D). The majority of the antibodies cluster very closely to one another, while there are a few distinct groups. BIIB-9-484 appeared to fall into a unique bin.

### Example 9

### Calcium Dependent Binding of BIIB-9-484 and BIIB-9-1336

[1105] Owing to the unique binning profile of BIIB-9-484, we investigated additional properties of this antibody as well as an affinity matured daughter, BIIB-9-1336. Since the activity and binding properties of many coagulation factors, including for FIXa, are calcium dependent, we first tested whether the binding of these two antibodies was affected by the presence or absence of calcium using biolayer interferometry (BLI).

[1106] Using the Octet QK384 system anti-Human IgG Quantitation (AHQ) dip and read biosensors (Pall Fortebio: Catalog #18-5005) were equilibrated in HBS for 60 seconds, followed by a 180 second loading step of the antibodies at 10ug/mL onto the probes. After a 60 second baseline step in HBS, the antibody-loaded probes were exposed to 200 nM FIXa in HBS or HBS with 5 mM CaCl₂) for 180 seconds, followed by a dissociation step in HBS or HBS with 5 mM CaCl₂) alone for 180 seconds.

[1107] The binding data shown in FIGS. 32A and 32B indicates that the binding of both BIIB-9-484 and BIIB-9-1336 to FIXa is calcium-dependent. BIIB-9-484 is completely dependent on the presence of calcium, while the binding of BIIB-9-1336 to FIXa is significantly reduced, but still measurable, in the absence of calcium.

### Example 10

### Effect of BIIB-9-1336 on Proteolytic Activity of FIXa

[1108] To determine whether BIIB-9-1336 has an effect on the enzymatic function of FIXa, we incubated varying amounts of antibody with 250 nM of FIXa in TBSCa for 5 minutes. Subsequently a peptide substrate, ADG299, was added to a final concentration of 0.8 mM and the rate of substrate cleavage by FIXa was measured by the change in OD over time (FIG. 33A).

[1109] For comparison, another anti-FIXa antibody, BIIB-9-579, was also tested for its ability to affect the amidolytic activity of FIXa, as well as an anti-FX antibody, BIIB-12-917, as a negative control. BIIB-9-1336 was able to increase the rate of substrate cleavage by FIXa 3-fold, while BIIB-9-579 and BIIB-12-917 had no effect.

[1110] This activity is not dependent on the homodimeric nature of BIIB-9-1336 as the one-armed and bispecific antibodies, which contain only one BIIB-9-1336 arm, showed the same 3-fold increase in rate. Since BIIB-9-1336 is a daughter of BIIB-9-484 and falls into the same unique bin, we continued to test other antibodies in this bin for the ability to increase the amidolytic activity of FIXa. Using the same assay set-up as described above, though using 500 nM FIXa, we tested 15 antibodies from the BIIB-9-484/1336 bin and an additional 11 daughter antibodies from the BIIB-9-619 and BIIB-9-578, which fall into different bins.

[1111] The fold-increase in amidolytic activity of FIXa in the presence of these antibodies is shown in FIG. 33B, and indicates that the ability to increase the amidolytic activity of FIXa is unique to antibodies form the BIIB-9-484/BIIB-9-1336 bin, reaching up to a 5-fold increase under the conditions tested. We next determined the kinetic parameters, KM and Vmax, of FIXa towards ADG299 in the presence an absence of BIIB-9-1336. Here, 500 nM of FIXa was incubated with 1000 nM of BIIB-9-1336 in TBSCa plus 33% ethylene glycol. The concentration of the substrate ADG299 was varied from 10 mM to 0.078 mM. Addition of BIIB-9-1336 reduced the KM from 4.4 mM to 3.4 mM and increased the Vmax from 500 mOD/min to 588 mOD/min (FIGS. 33C and 33D).

[1112] The ability of the BIIB-9-1336/BIIB-12-917 and one-armed BIIB-9-1336 to increase the amidolytic activity to a similar level as the homodimeric, bivalent BIIB-9-1336 indicates that this activity results from the monovalent interaction between one BIIB-9-1336 arm and FIXa.

### Example 11

### Effect of BIIB-9-1336 on ATIII Inhibition of FIXa

[1113] Anti-thrombin III is a serine protease inhibitor and leads to the formation of an irreversible bond between ATIII and the active site serine of FIXa. Hence, the mechanism of inhibition relies on the reactivity of the FIXa active site. Since BIIB-9-1336 is able to increase the amidolytic activity of FIXa, it stands to reason that it should also increase the rate of FIXa inhibition by ATIII. To test this, we incubated 500 nM of FIXa with 5000 nM ATIII in TBSCa in the precense of absence of 1500 nM BIIB-9-1336 or BIIB-9-1335, another anti-FIXa antibody that was identified during the affinity maturation of BIIB-9-484. Samples were removed at 1, 30, 60, and 120 minutes and mixed with non-reducing SDS loading buffer and run on a 4-20% BioRad stain-free gel (FIG. 34A).

[1114] The appearance of a band running near the 75 kDa molecular weight marker indicates formation of the ATIII-FIXa complex. Relative band intensity was quantified and plotted over time (FIG. 34B) and shows that BIIB-9-1335, and BIIB-9-1336 are able to increase the rate of ATIII inhibition of FIXa approximately 3-fold.

### Example 12

### Characterization of the BIIB-9-1336 Epitope on FIXa

[1115] To further our understanding of the interaction of BIIB-9-484 and BIIB-9-1336 with FIXa, we sought to determine the exact epitope of these antibodies. To do this, we first cloned, expressed, and purified only the Fab portion of each of these antibodies using standard methods. Subsequently, we mixed each Fab in a 1.5:1 molar ratio with FIXa in a calcium containing buffer and purified the resulting complex from excess Fab using size exclusion chromatography.

[1116] The resulting 1:1 complexes were screened in commercially available crystallization screens using the vapor diffusion method. While both complexes resulted in crystals, only the BIIB-9-1336 complex crystals produced high quality diffraction data. The resulting structure between the BIIB-9-1336 Fab and FIXa was solved by molecular replacement using standard methods and is shown in FIG. 35.

[1117] The residues on FIXa that constitute the BIIB-9-1336 epitope are shown in black in FIG. 36 and, for comparison, the residues that constitute the FVIIIa binding site on FIXa are also shown. These same residues are listed in the table in FIG. 37.

[1118] These data reveal that BIIB-9-1336 and FVIIIa share an overlapping epitope on FIXa. The residues that are shared are outlined in white in FIG. 36 and underlined and shown in bold in FIG. 37.

### Example 13

### Characterization of the BIIB-12-917 Epitope on FX

[1119] We sought to characterize the epitope of BIIB-12-917 on FX since it forms a productive bispecific antibody, with high FVIIIa-like activity, when paired with BIIB-9-484 or BIIB-9-1336. Using BLI, we tested the binding of BIIB-12-917 to a panel of different recombinant FX variants including wild type zymogen FX (FXz), wild type activated FX (FXa), activated FX which retains the activation peptide (FXa+AP), zymogen FX with the activation peptide lacking (FX-AP), and zymogen FIX which contains the activation peptide from FX (FIX+FX AP). A schematic representation of the variants is provided in FIG. 38B.

[1120] Using the Octet QK384 anti-Human IgG Quantitation (AHQ) dip and read were equilibrated in HBSCa for 60 seconds, followed by a 180 second loading step of the antibodies 15ug/mL onto the probes. After a 60 second baseline step in HBSCa, the antibody-loaded probes were exposed to 250 nM of each FX variant in HBSCa for 300 seconds, followed by a dissociation step in HBSCa for 180 seconds. The binding data in FIG. 38A show that BIIB-12-917 binds to all constructs containing the activation peptide of FX, but not to those lacking the activation peptide. Thus, the epitope of BIIB-12-917 lies within the activation peptide of FX.

### Example 14

### New Anti-FIXa Antibodies

[1121] A series of antibodies derived from BIIB-9-484, BIIB-9-1336, BIIB-9-578, or BIIB-9-619 was generated by introducing amino acid diversity into the CDR H1 and CDR H2; or CDR H3; or CDR L1, CDR L2 and CDR L3; or a combination of these. Antibodies with increased FIXa specificity and/or affinity were identified from these libraries using the methods described in Examples 1 and 5. The sequences of the VH and VL domains of these antibodies as well as their CDRs are provided below in Tables 6 and 7.

### Example 15

### Pharmacokinetics and Pharmacodynamics of Bispecific Antibodies in a Humanized Mouse Model of Hemophilia A

[1122] Pre-clinical pharmacokinetic assessment of bispecific antibodies is performed in a humanized mouse model of hemophilia A. Human FIX and human FX genes will be knocked-in, separately, to each respective mouse gene locus via homologous recombination using embryonic stem cell gene targeting. The FVIII gene of human FIX knock-in mice is subsequently edited by CRISPR/Cas9 technology to produce FVIII gene knock-outs. Breeding crosses between human FIX knock-ins and human FX knock-ins will result in mice homozygous for both human FIX and human FX (FIX-X-KI). This mouse model is useful for performing thrombosis models such as the inferior vena cava stasis model or the carotid artery ferric chloride-injury model. Breeding crosses between human FIX knock-ins lacking the mouse FVIII gene and human FX knock-ins will result in mice homozygous for human FIX, human FX, and deficient in FVIII (FIX-X-KI/FVIII-def). This mouse model is useful for performing hemostasis models such as the tail-clip model and the tail vein transection model.

[1123] In these experiments, FIX-X-KI/FVIII-def mice are dosed with a range of amounts of bispecific antibodies, control antibodies, rFVIII, and/or bypass therapies such as rFVIIa or activated prothrombin complex concentrates (aPCC). Groups of mice are dosed per molecule and per time point. At each time point post-dosing, mice are euthanized and blood is collected. A portion of the blood is used for rotational thromboelastometry (ROTEM) or other activity-based assay and the remaining blood is processed to plasma to determine circulating levels of bispecific antibodies by ELISA.

### Example 16

### Efficacy of Bispecific Antibodies in a Humanized Mouse Model of Hemophilia A

[1124] Acute efficacy of bispecific antibodies is determined with the tail-clip bleeding model in which the tail tip is amputated and total blood loss from FIX-X-KI/FVIII-def mice are dosed with a range of amounts of bispecific antibodies, control antibodies, rFVIII, and/or bypass therapies such as rFVIIa or aPCC, is measured as previously described (Dumont et al., 2012, Blood, 119(13):3024-3030). Prolonged efficacy of bispecific antibodies is determined with the tail vein transection model, as described previously (Pan et al., 2009, Blood, 114(13):2802-2811). Briefly, FIX-FX-KI/FVIII-def mice are dosed with a range of amounts of bispecific antibodies, control antibodies, rFVIII, and/or bypass therapies such as rFVIIa or aPCC and 24 hours post-dosing are anesthetized and subjected to transection of a tail vein. Bleeding time is recorded and mice are returned to cages for up to 24 hours at which point they are assessed for re-bleeding, overall responsiveness, activity and percent survival.

### Example 17

### Safety Assessment of Bispecific Antibodies in a Humanized Mouse Model

[1125] Thrombosis models are used to evaluate bispecific antibodies for potential prothrombotic properties. The inferior vena cava stasis model (Aleman et al., 2014, J Clin Invest, 124(8):3590-3600) or the carotid artery ferric chloride injury model (Machlus et al., 2011, Blood, 117(18):4953-4963) will be performed. Briefly, for the inferior vena cava model, FIX-FX-KI mice are anesthetized, dosed with a range of amounts of bispecific antibodies, control antibodies, rFVIII, and/or bypass therapies such as rFVIIa or aPCC and subjected to aseptic laparotomy to fully ligate the inferior vena cava. After 24 hours, mice are euthanized and thrombus weights are measured. For the carotid artery ferric chloride injury model, FIX-FX-KI mice are anesthetized and dosed with a range of amounts of bispecific antibodies, control antibodies, rFVIII, and/or bypass therapies such as rFVIIa or aPCC. The carotid artery is injured with a 10% ferric chloride solution. Changes in blood flow are monitored by Doppler ultrasound and the time to occlusion of the carotid artery is recorded.

### Example 18

### Pharmacokinetics and Pharmacodynamics of Bispecific Antibodies in Cynomolgus Monkeys

[1126] Pharmacokinetic and pharmacodynamic assessment of bispecific antibodies in cynomolgus monkeys is also performed, as described (Dumont et al., 2015, Thromb Res, 136(6):1266-1272). Briefly, an acquired hemophilia A model will be developed, such as described in Muto et al., 2014, Blood, 124(20):3165-3171. Hemophilic monkeys will be dosed with a range of amounts of bispecific antibodies, control antibodies, rFVIII, and/or bypass therapies such as rFVIIa or aPCC. Blood samples will be collected at a range of time points post-dose. A portion of the blood will be used for ROTEM analysis or other activity-based assay and the remaining blood will be processed to plasma to determine circulating levels of bispecific antibodies by ELISA.

[1127] It is to be appreciated that the Detailed Description section, and not the Summary and Abstract sections, is intended to be used to interpret the claims. The Summary and Abstract sections may set forth one or more but not all exemplary embodiments of the present invention as contemplated by the inventor(s), and thus, are not intended to limit the present invention and the appended claims in any way.

[1128] The present invention has been described above with the aid of functional building blocks illustrating the implementation of specified functions and relationships thereof. The boundaries of these functional building blocks have been arbitrarily defined herein for the convenience of the description. Alternate boundaries can be defined so long as the specified functions and relationships thereof are appropriately performed.

[1129] The foregoing description of the specific embodiments will so fully reveal the general nature of the invention that others can, by applying knowledge within the skill of the art, readily modify and/or adapt for various applications such specific embodiments, without undue experimentation, without departing from the general concept of the present invention. Therefore, such adaptations and modifications are intended to be within the meaning and range of equivalents of the disclosed embodiments, based on the teaching and guidance presented herein. It is to be understood that the phraseology or terminology herein is for the purpose of description and not of limitation, such that the terminology or phraseology of the present specification is to be interpreted by the skilled artisan in light of the teachings and guidance.

[1130] The breadth and scope of the present invention should not be limited by any of the above-described exemplary embodiments, but should be defined only in accordance with the following claims and their equivalents.

[1131] The contents of all cited references (including literature references, patents, patent applications, and websites) that may be cited throughout this application are hereby expressly incorporated by reference in their entirety for any purpose, as are the references cited therein.

TABLE 4
Sequences

| | | |
|---|---|---|
| SEQ | | |
| ID | | |
| NO | Description | Sequence |

Class I Antibodies - VH Sequences

| | | |
|---|---|---|
| 1 | BIIB-9-605_VH | EVQLLESGGGLVQPGGSLRLSCAASGFTFSSYAMSWVRQAPGKGLEWVSAISGSGGSTYYADSVKGRFTI |
| | Amino Acid | SRDNSKNTLYLQMNSLRAEDTAVYYCAKKRKYYGSHNPWGQGTLVTVSS |
| | Sequence | |
| 2 | BIIB-9-605_VH | GAGGTGCAGCTGTTGGAGTCTGGGGGAGGCTTGGTACAGCCTGGGGGGTCCCTGAGACTCTCCTGTGCAG |
| | Nucleic Acid | CCTCTGGATTCACCTTTAGCAGCTATGCCATGAGCTGGGTCCGCCAGGCTCCAGGGAAGGGGCTGGAGTG |
| | Sequence | GGTCTCAGCTATTAGTGGTAGTGGTGGTAGCACATACTACGCAGACTCCGTGAAGGGCCGGTTCACCATC |
| | | TCCAGAGACAATTCCAAGAACACGCTGTATCTGCAAATGAACAGCCTGAGAGCCGAGGACACGGCGGTGT |
| | | ACTACTGCGCTAAAAAGAGAAAGTACTACGGTTCACATAACCCATGGGGACAGGGTACATTGGTCACCGT |
| | | CTCCTCA |
| 3 | BIIB-9-475_VH | QVQLQESGPGLVKPSETLSLTCTVSGGSISSYYWSWIRQPPGKGLEWIGSIYYSGSTNYNPSLKSRVTIS |
| | Amino Acid | VDTSKNQFSLKLSSVTAADTAVYYCARDVGGYDYGVGAFDIWGQGTMVTVSS |
| | Sequence | |
| 4 | BIIB-9-475_VH | CAGGTGCAGCTGCAGGAGTCGGGCCCAGGACTGGTGAAGCCTTCGGAGACCCTGTCCCTCACCTGCACTG |
| | Nucleic Acid | TCTCTGGTGGCTCCATCAGTAGTTACTACTGGAGCTGGATCCGGCAGCCCCCAGGGAAGGGACTGGAGTG |
| | Sequence | GATTGGGTCAATCTATTACAGTGGGAGCACCAACTACAACCCCTCCCTCAAGAGTCGAGTCACCATATCA |
| | | GTAGACACGTCCAAGAACCAGTTCTCCCTGAAGCTGAGTTCTGTGACCGCCGCAGACACGGCGGTGTACT |
| | | ACTGCGCCAGAGATGTGGGCGGATACGACTACGGAGTGGGAGCCTTCGACATATGGGGTCAGGGTACAAT |
| | | GGTCACCGTCTCCTCA |
| 5 | BIIB-9-477_VH | EVQLLESGGGLVQPGGSLRLSCAASGFTFSNYAMSWVRQAPGKGLEWVSAISGSGGSTYYADSVKGRFTI |
| | Amino Acid | SRDNSKNTLYLQMNSLRAEDTAVYYCARGGVYSSSWMRFWGQGTLVTVSS |
| | Sequence | |
| 6 | BIIB-9-477_VH | GAGGTGCAGCTGTTGGAGTCTGGGGGAGGCTTGGTACAGCCTGGGGGGTCCCTGAGACTCTCCTGTGCAG |
| | Nucleic Acid | CCTCTGGATTCACCTTTAGCAATTATGCCATGAGCTGGGTCCGCCAGGCTCCAGGGAAGGGGCTGGAGTG |
| | Sequence | GGTCTCAGCTATTAGTGGTAGTGGTGGTAGCACATACTACGCAGACTCCGTGAAGGGCCGGTTCACCATC |
| | | TCCAGAGACAATTCCAAGAACACGCTGTATCTGCAAATGAACAGCCTGAGAGCCGAGGACACGGCGGTGT |
| | | ACTACTGCGCCAGAGGTGGCGTGTACAGCAGCTCGTGGATGAGATTCTGGGGACAGGGTACATTGGTCAC |
| | | CGTCTCCTCA |
| 7 | BIIB-9-479_VH | QVQLQESGPGLVKPSETLSLTCTVSGGSISSYYWSWIRQPPGKGLEWIGSIYYSGSTNYNPSLKSRVTIS |
| | Amino Acid | VDTSKNQFSLKLSSVTAADTAVYYCAREHYGDYPLFDIWGQGTMVTVSS |
| | Sequence | |
| 8 | BIIB-9-479_VH | CAGGTGCAGCTGCAGGAGTCGGGCCCAGGACTGGTGAAGCCTTCGGAGACCCTGTCCCTCACCTGCACTG |
| | Nucleic Acid | TCTCTGGTGGCTCCATCAGTAGTTACTACTGGAGCTGGATCCGGCAGCCCCCAGGGAAGGGACTGGAGTG |
| | Sequence | GATTGGGTCAATCTATTACAGTGGGAGCACCAACTACAACCCCTCCCTCAAGAGTCGAGTCACCATATCA |
| | | GTAGACACGTCCAAGAACCAGTTCTCCCTGAAGCTGAGTTCTGTGACCGCCGCAGACACGGCGGTGTACT |
| | | ACTGCGCCAGAGAGCACTACGGAGACTACCCACTATTCGACATATGGGGTCAGGGTACAATGGTCACCGT |
| | | CTCCTCA |
| 9 | BIIB-9-480_VH | QVQLQESGPGLVKPSETLSLTCAVSGYSISSGYYWGWIRQPPGKGLEWIGSSYHSGSTYYNPSLKSRVTI |
| | Amino Acid | SVDTSKNQFSLKLSSVTAADTAVYYCARDQQDYGAFDIWGQGTMVTVSS |
| | Sequence | |
| 10 | BIIB-9-480_VH | CAGGTGCAGCTGCAGGAGTCGGGCCCAGGACTGGTGAAGCCTTCGGAGACCCTGTCCCTCACCTGCGCTG |
| | Nucleic Acid | TCTCTGGTTACTCCATCAGCAGTGGTTACTACTGGGGCTGGATCCGGCAGCCCCCAGGGAAGGGGCTGGA |
| | Sequence | GTGGATTGGGAGTTCCTATCATAGTGGGAGCACCTACTACAACCCGTCCCTCAAGAGTCGAGTCACCATA |
| | | TCAGTAGACACGTCCAAGAACCAGTTCTCCCTGAAGCTGAGTTCTGTGACCGCCGCAGACACGGCGGTGT |
| | | ACTACTGCGCCAGGGACCAGCAAGACTACGGGGCCTTCGACATATGGGGTCAGGGTACAATGGTCACCGT |
| | | CTCCTCA |
| 11 | BIIB-9-558_VH | EVQLVESGGGLVKPGGSLRLSCAASGFTFSSYSMNWVRQAPGKGLEWVSSISSSSSYIYYADSVKGRFTI |
| | Amino Acid | SRDNAKNSLYLQMNSLRAEDTAVYYCARSYGYGYHDFDLWGRGTLVTVSS |
| | Sequence | |
| 12 | BIIB-9-558_VH | GAGGTGCAGCTGGTGGAGTCTGGGGGAGGCCTGGTCAAGCCTGGGGGGTCCCTGAGACTCTCCTGTGCAG |
| | Nucleic Acid | CCTCTGGATTCACCTTCAGTAGCTATAGCATGAACTGGGTCCGCCAGGCTCCAGGGAAGGGGCTGGAGTG |
| | Sequence | GGTCTCATCCATTAGTAGTAGTAGTAGTTACATATACTACGCAGACTCAGTGAAGGGCCGATTCACCATC |
| | | TCCAGAGACAACGCCAAGAACTCACTGTATCTGCAAATGAACAGCCTGAGAGCCGAGGACACGGCGGTGT |
| | | ACTACTGCGCCAGATCTTACGGATACGGATACCACGACTTCGACCTATGGGGGAGAGGTACCTTGGTCAC |
| | | CGTCTCCTCA |
| 13 | BIIB-9-414_VH | QVQLVQSGAEVKKPGASVKVSCKASGYTFTSYYMHWVRQAPGQGLEWMGIINPSGGSTSYAQKFQGRVTM |
| | Amino Acid | TRDTSTSTVYMELSSLRSEDTAVYYCARDPYSYGMYYFDYWGQGTLVTVSS |
| | Sequence | |
| 14 | BIIB-9-414_VH | CAGGTGCAGCTGGTGCAGTCTGGGGCTGAGGTGAAGAAGCCTGGGGCCTCAGTGAAGGTTTCCTGCAAGG |
| | Nucleic Acid | CATCTGGATACACCTTCACCAGCTACTATATGCACTGGGTGCGACAGGCCCCTGGACAAGGGCTTGAGTG |
| | Sequence | GATGGGAATAATCAACCCTAGTGGTGGTAGCACAAGCTACGCACAGAAGTTCCAGGGCAGAGTCACCATG |
| | | ACCAGGGACACGTCCACGAGCACAGTCTACATGGAGCTGAGCAGCCTGAGATCTGAGGACACGGCGGTGT |
| | | ACTACTGCGCCAGAGACCCTTACTCCTACGGAATGTATTACTTTGATTACTGGGGACAGGGTACATTGGT |
| | | CACCGTCTCCTCA |
| 15 | BIIB-9-415_VH | QVQLVQSGAEVKKPGASVKVSCKASGYTFTSYYMHWVRQAPGQGLEWMGIINPSGGSTSYAQKFQGRVTM |
| | Amino Acid | TRDTSTSTVYMELSSLRSEDTAVYYCARDGLSSGYYWDNWGQGTLVTVSS |
| | Sequence | |
| 16 | BIIB-9-415_VH | CAGGTGCAGCTGGTGCAGTCTGGGGCTGAGGTGAAGAAGCCTGGGGCCTCAGTGAAGGTTTCCTGCAAGG |
| | Nucleic Acid | CATCTGGATACACCTTCACCAGCTACTATATGCACTGGGTGCGACAGGCCCCTGGACAAGGGCTTGAGTG |
| | Sequence | GATGGGAATAATCAACCCTAGTGGTGGTAGCACAAGCTACGCACAGAAGTTCCAGGGCAGAGTCACCATG |
| | | ACCAGGGACACGTCCACGAGCACAGTCTACATGGAGCTGAGCAGCCTGAGATCTGAGGACACGGCGGTGT |
| | | ACTACTGCGCCAGAGATGGGTTGAGCAGCGGATACTACTGGGATAATTGGGGACAGGGTACATTGGTCAC |
| | | CGTCTCCTCA |
| 17 | BIIB-9-425_VH | QVQLVQSGAEVKKPGASVKVSCKASGYTFTSYYMHWVRQAPGQGLEWMGIINPSGGSTSYAQKFQGRVTM |
| | Amino Acid | TRDTSTSTVYMELSSLRSEDTAVYYCAREPTWDVAYDYWGQGTLVTVS |
| | Sequence | |
| 18 | BIIB-9-425_VH | CAGGTGCAGCTGGTGCAGTCTGGGGCTGAGGTGAAGAAGCCTGGGGCCTCAGTGAAGGTTTCCTGCAAGG |
| | Nucleic Acid | CATCTGGATACACCTTCACCAGCTACTATATGCACTGGGTGCGACAGGCCCCTGGACAAGGGCTTGAGTG |
| | Sequence | GATGGGAATAATCAACCCTAGTGGTGGTAGCACAAGCTACGCACAGAAGTTCCAGGGCAGAGTCACCATG |
| | | ACCAGGGACACGTCCACGAGCACAGTCTACATGGAGCTGAGCAGCCTGAGATCTGAGGACACGGCGGTGT |
| | | ACTACTGCGCCAGAGAGCCTACCTGGGACGTCGCCTACGATTATTGGGGACAGGGTACATTGGTCACCGT |
| | | CTCCTCA |
| 19 | BIIB-9-440_VH | QLQLQESGPGLVKPSETLSLTCTVSGGSISSSDYYWGWIRQPPGKGLEWIGSIYYSGSTYYNPSLKSRVT |
| | Amino Acid | ISVDTSKNQFSLKLSSVTAADTAVYYCARSPRHKVRGPNWFDPWGQGTLVTVSS |
| | Sequence | |
| 20 | BIIB-9-440_VH | CAGCTGCAGCTGCAGGAGTCGGGCCCAGGACTGGTGAAGCCTTCGGAGACCCTGTCCCTCACCTGCACTG |
| | Nucleic Acid | TCTCTGGTGGCTCCATCAGCAGTAGTGACTACTACTGGGGCTGGATCCGCCAGCCCCCAGGGAAGGGGCT |
| | Sequence | GGAGTGGATTGGGAGTATCTATTATAGTGGGAGCACCTACTACAACCCGTCCCTCAAGAGTCGAGTCACC |
| | | ATATCCGTAGACACGTCCAAGAACCAGTTCTCCCTGAAGCTGAGTTCTGTGACCGCCGCAGACACGGCGG |
| | | TGTACTACTGCGCCAGATCACCTAGGCACAAAGTGCGTGGCCCCAATTGGTTTGATCCATGGGGACAGGG |
| | | TACATTGGTCACCGTCTCCTCA |
| 21 | BIIB-9-452_VH | QVQLVQSGAEVKKPGASVKVSCKASGYTFTSYYMHWVRQAPGQGLEWMGIINPSGGSTSYAQKFQGRVTM |
| | Amino Acid | TRDTSTSTVYMELSSLRSEDTAVYYCARDGRLSYTWDRWGQGTLVTVSS |
| | Sequence | |
| 22 | BIIB-9-452_VH | CAGGTGCAGCTGGTGCAGTCTGGGGCTGAGGTGAAGAAGCCTGGGGCCTCAGTGAAGGTTTCCTGCAAGG |
| | Nucleic Acid | CATCTGGATACACCTTCACCAGCTACTATATGCACTGGGTGCGACAGGCCCCTGGACAAGGGCTTGAGTG |
| | Sequence | GATGGGAATAATCAACCCTAGTGGTGGTAGCACAAGCTACGCACAGAAGTTCCAGGGCAGAGTCACCATG |
| | | ACCAGGGACACGTCCACGAGCACAGTCTACATGGAGCTGAGCAGCCTGAGATCTGAGGACACGGCGGTGT |
| | | ACTACTGCGCCAGAGACGGCAGACTAAGCTACACCTGGGACAGATGGGGACAGGGTACATTGGTCACCGT |
| | | CTCCTCA |
| 23 | BIIB-9-460_VH | QVQLVQSGAEVKKPGASVKVSCKASGYTFTSYYMHWVRQAPGQGLEWMGIINPSGGSTSYAQKFQGRVTM |
| | Amino Acid | TRDTSTSTVYMELSSLRSEDTAVYYCARDISTDGESSLYYYMDVWGKGTTVTVSS |
| | Sequence | |
| 24 | BIIB-9-460_VH | CAGGTGCAGCTGGTGCAGTCTGGGGCTGAGGTGAAGAAGCCTGGGGCCTCAGTGAAGGTTTCCTGCAAGG |
| | Nucleic Acid | CATCTGGATACACCTTCACCAGCTACTATATGCACTGGGTGCGACAGGCCCCTGGACAAGGGCTTGAGTG |
| | Sequence | GATGGGAATAATCAACCCTAGTGGTGGTAGCACAAGCTACGCACAGAAGTTCCAGGGCAGAGTCACCATG |
| | | ACCAGGGACACGTCCACGAGCACAGTCTACATGGAGCTGAGCAGCCTGAGATCTGAGGACACGGCGGTGT |
| | | ACTACTGCGCAAGGGATATTTCTACCGACGGGGAATCATCACTTTACTACTACATGGACGTATGGGGCAA |
| | | GGGTACAACTGTCACCGTCTCCTCA |
| 25 | BIIB-9-461_VH | QVQLVQSGAEVKKPGASVKVSCKASGYTFTSYYMHWVRQAPGQGLEWMGIINPSGGSTSYAQKFQGRVTM |
| | Amino Acid | TRDTSTSTVYMELSSLRSEDTAVYYCARGPTDSSGYLDMDVWGKGTTVTVSS |
| | Sequence | |
| 26 | BIIB-9-461_VH | CAGGTGCAGCTGGTGCAGTCTGGGGCTGAGGTGAAGAAGCCTGGGGCCTCAGTGAAGGTTTCCTGCAAGG |
| | Nucleic Acid | CATCTGGATACACCTTCACCAGCTACTATATGCACTGGGTGCGACAGGCCCCTGGACAAGGGCTTGAGTG |
| | Sequence | GATGGGAATAATCAACCCTAGTGGTGGTAGCACAAGCTACGCACAGAAGTTCCAGGGCAGAGTCACCATG |
| | | ACCAGGGACACGTCCACGAGCACAGTCTACATGGAGCTGAGCAGCCTGAGATCTGAGGACACGGCGGTGT |
| | | ACTACTGCGCCAGAGGACCCACTGACAGCAGCGGATACTTGGACATGGACGTATGGGGCAAGGGTACAAC |
| | | TGTCACCGTCTCCTCA |
| 27 | BIIB-9-465_VH | QVQLVQSGAEVKKPGASVKVSCKASGYTFTSYYMVWVRQAPGQGLEWMGIINPSGGSTSYAQKFQGRVTM |
| | Amino Acid | TRDTSTSTVYMELSSLRSEDTAVYYCARSPTDGYYFDLWGRGTLVTVSS |
| | Sequence | |
| 28 | BIIB-9-465_VH | CAGGTGCAGCTGGTGCAGTCTGGGGCTGAGGTGAAGAAGCCTGGGGCCTCAGTGAAGGTTTCCTGCAAGG |
| | Nucleic Acid | CATCTGGATACACCTTCACCAGCTACTATATGGTCTGGGTGCGACAGGCCCCTGGACAAGGGCTTGAGTG |
| | Sequence | GATGGGAATAATCAACCCTAGTGGTGGTAGCACAAGCTACGCACAGAAGTTCCAGGGCAGAGTCACCATG |
| | | ACCAGGGACACGTCCACGAGCACAGTCTACATGGAGCTGAGCAGCCTGAGATCTGAGGACACGGCGGTGT |
| | | ACTACTGCGCCAGATCACCTACGGACGGATACTATTTCGACCTATGGGGGAGAGGTACCTTGGTCACCGT |
| | | CTCCTCA |
| 29 | BIB-4-564_VH | QVQLQESGPGLVKPSETLSLTCAVSGYSISSGYYWAWIRQPPGKGLEWIGSIYHSGSTYYNPSLKSRVTI |
| | Amino Acid | SVDTSKNQFSLKLSSVTAADTAVYYCARDPGYSWEYFDYWGQGTLVTVSS |
| | Sequence | |
| 30 | BIIB-9-564_VH | CAGGTGCAGCTGCAGGAGTCGGGCCCAGGACTGGTGAAGCCTTCGGAGACCCTGTCCCTCACCTGCGCTG |
| | Nucleic Acid | TCTCTGGTTACTCCATCAGCAGTGGTTACTACTGGGCTTGGATCCGGCAGCCCCCAGGGAAGGGGCTGGA |
| | Sequence | GTGGATTGGGAGTATCTATCATAGTGGGAGCACCTACTACAACCCGTCCCTCAAGAGTCGAGTCACCATA |
| | | TCAGTAGACACGTCCAAGAACCAGTTCTCCCTGAAGCTGAGTTCTGTGACCGCCGCAGACACGGCGGTGT |
| | | ACTACTGCGCCAGAGATCCAGGATACAGCTGGGAGTACTTTGACTACTGGGGACAGGGTACATTGGTCAC |
| | | CGTCTCCTCA |
| 31 | BIIB-9-484_VH | EVQLVESGGGLVKPGGSLRLSCAASGFTFSSYSMNWVRQAPGKGLEWVSSISSSSSYIYYADSVKGRFTI |
| | Amino Acid | SRDNAKNSLYLQMNSLRAEDTAVYYCARDVGGYAGYYGMDVWGQGTTVTVSS |
| | Sequence | |
| 32 | BIIB-9-484_VH | GAGGTGCAGCTGGTGGAGTCTGGGGGAGGCCTGGTCAAGCCTGGGGGGTCCCTGAGACTCTCCTGTGCAG |
| | Nucleic Acid | CCTCTGGATTCACCTTCAGTAGCTATAGCATGAACTGGGTCCGCCAGGCTCCAGGGAAGGGGCTGGAGTG |
| | Sequence | GGTCTCATCCATTAGTAGTAGTAGTAGTTACATATACTACGCAGACTCAGTGAAGGGCCGATTCACCATC |
| | | TCCAGAGACAACGCCAAGAACTCACTGTATCTGCAAATGAACAGCCTGAGAGCCGAGGACACGGCGGTGT |
| | | ACTACTGCGCCAGAGATGTAGGAGGATACGCAGGGTACTACGGCATGGATGTATGGGGCCAGGGAACAAC |
| | | TGTCACCGTCTCCTCA |
| 33 | BIIB-9-469_VH | QVQLVQSGAEVKKPGASVKVSCKASGYTFTSYYMHWVRQAPGQGLEWMGIINPSGGSTSYAQKFQGRVTM |
| | Amino Acid | TRDTSTSTVYMELSSLRSEDTAVYYCARDLGYGRSYDFDLWGRGTLVTVSS |
| | Sequence | |
| 34 | BIIB-9-469_VH | CAGGTGCAGCTGGTGCAGTCTGGGGCTGAGGTGAAGAAGCCTGGGGCCTCAGTGAAGGTTTCCTGCAAGG |
| | Nucleic Acid | CATCTGGATACACCTTCACCAGCTACTATATGCACTGGGTGCGACAGGCCCCTGGACAAGGGCTTGAGTG |
| | Sequence | GATGGGAATAATCAACCCTAGTGGTGGTAGCACAAGCTACGCACAGAAGTTCCAGGGCAGAGTCACCATG |
| | | ACCAGGGACACGTCCACGAGCACAGTCTACATGGAGCTGAGCAGCCTGAGATCTGAGGACACGGCGGTGT |
| | | ACTACTGCGCCAGAGACTTGGGATACGGCAGAAGTTATGACTTCGACCTATGGGGGAGAGGTACCTTGGT |
| | | CACCGTCTCCTCA |
| 35 | BIIB-9-566_VH | QVQLVQSGAEVKKPGASVKVSCKASGYTFTSYYMVWVRQAPGQGLEWMGIINPSGGSTSYAQKFQGRVTM |
| | Amino Acid | TRDTSTSTVYMELSSLRSEDTAVYYCARVPTYRYSYLAFDIWGQGTMVTVSS |
| | Sequence | |
| 36 | BIIB-9-566_VH | CAGGTGCAGCTGGTGCAGTCTGGGGCTGAGGTGAAGAAGCCTGGGGCCTCAGTGAAGGTTTCCTGCAAGG |
| | Nucleic Acid | CATCTGGATACACCTTCACCAGCTACTATATGGTCTGGGTGCGACAGGCCCCTGGACAAGGGCTTGAGTG |
| | Sequence | GATGGGAATAATCAACCCTAGTGGTGGTAGCACAAGCTACGCACAGAAGTTCCAGGGCAGAGTCACCATG |
| | | ACCAGGGACACGTCCACGAGCACAGTCTACATGGAGCTGAGCAGCCTGAGATCTGAGGACACGGCGGTGT |
| | | ACTACTGCGCCAGAGTCCCTACATACAGATACAGCTACTTAGCCTTCGATATCTGGGGTCAGGGTACAAT |
| | | GGTCACCGTCTCCTCA |
| 37 | BIIB-9-567_VH | QVQLVQSGAEVKKPGASVKVSCKASGYTFTSYYMHWVRQAPGQGLEWMGIINPSGGSTSYAQKFQGRVTM |
| | Amino Acid | TRDTSTSTVYMELSSLRSEDTAVYYCARLGRRYYAYDGMDVWGQGTTVTVSS |
| | Sequence | |
| 38 | BIIB-9-567_VH | CAGGTGCAGCTGGTGCAGTCTGGGGCTGAGGTGAAGAAGCCTGGGGCCTCAGTGAAGGTTTCCTGCAAGG |
| | Nucleic Acid | CATCTGGATACACCTTCACCAGCTACTATATGCACTGGGTGCGACAGGCCCCTGGACAAGGGCTTGAGTG |
| | Sequence | GATGGGAATAATCAACCCTAGTGGTGGTAGCACAAGCTACGCACAGAAGTTCCAGGGCAGAGTCACCATG |
| | | ACCAGGGACACGTCCACGAGCACAGTCTACATGGAGCTGAGCAGCCTGAGATCTGAGGACACGGCGGTGT |
| | | ACTACTGCGCCAGATTGGGAAGAAGGTACTACGCCTATGATGGGATGGATGTTTGGGGCCAGGGAACAAC |
| | | TGTCACCGTCTCCTCA |
| 39 | BIIB-9-569_VH | QVQLVQSGAEVKKPGASVKVSCKASGYTFTSYYMHWVRQAPGQGLEWMGIINPSGGSTSYAQKFQGRVTM |
| | Amino Acid | TRDTSTSTVYMELSSLRSEDTAVYYCARDGSGYSPYSFDPWGQGTLVTVSS |
| | Sequence | |
| 40 | BIIB-9-569_VH | CAGGTGCAGCTGGTGCAGTCTGGGGCTGAGGTGAAGAAGCCTGGGGCCTCAGTGAAGGTTTCCTGCAAGG |
| | Nucleic Acid | CATCTGGATACACCTTCACCAGCTACTATATGCACTGGGTGCGACAGGCCCCTGGACAAGGGCTTGAGTG |
| | Sequence | GATGGGAATAATCAACCCTAGTGGTGGTAGCACAAGCTACGCACAGAAGTTCCAGGGCAGAGTCACCATG |
| | | ACCAGGGACACGTCCACGAGCACAGTCTACATGGAGCTGAGCAGCCTGAGATCTGAGGACACGGCGGTGT |
| | | ACTACTGCGCCAGAGACGGATCTGGATACAGTCCATACAGCTTCGACCCATGGGGACAGGGTACATTGGT |
| | | CACCGTCTCCTCA |
| 41 | BIIB-9-588_VH | QVQLVQSGAEVKKPGASVKVSCKASGYTFTSYYMHWVRQAPGQGLEWMGIINPSGGSTTYAQKFQGRVTM |
| | Amino Acid | TRDTSTSTVYMELSSLRSEDTAVYYCARDGGGSYDYWSGYWYDVWGQGTTVTVSS |
| | Sequence | |
| 42 | BIIB-9-588_VH | CAGGTGCAGCTGGTGCAGTCTGGGGCTGAGGTGAAGAAGCCTGGGGCCTCAGTGAAGGTTTCCTGCAAGG |
| | Nucleic Acid | CATCTGGATACACCTTCACCAGCTACTATATGCACTGGGTGCGACAGGCCCCTGGACAAGGGCTTGAGTG |
| | Sequence | GATGGGAATAATCAACCCTAGTGGTGGTAGCACAACCTACGCACAGAAGTTCCAGGGCAGAGTCACCATG |
| | | ACCAGGGACACGTCCACGAGCACAGTCTACATGGAGCTGAGCAGCCTGAGATCTGAGGACACGGCGGTGT |
| | | ACTACTGCGCCAGAGATGGTGGCGGATCCTACGACTACTGGAGCGGATACTGGTACGACGTATGGGGTCA |
| | | GGGTACAACTGTCACCGTCTCCTCA |
| 43 | BIIB-9-611_VH | QVQLVQSGAEVKKPGASVKVSCKASGYTFTSYYMHWVRQAPGQGLEWMGIINPSGGSTSYAQKFQGRVTM |
| | Amino Acid | TRDTSTSTVYMELSSLRSEDTAVYYCAREVISRVSYFDLWGRGTLVTVSS |
| | Sequence | |
| 44 | BIIB-9-611_VH | CAGGTGCAGCTGGTGCAGTCTGGGGCTGAGGTGAAGAAGCCTGGGGCCTCAGTGAAGGTTTCCTGCAAGG |
| | Nucleic Acid | CATCTGGATACACCTTCACCAGCTACTATATGCACTGGGTGCGACAGGCCCCTGGACAAGGGCTTGAGTG |
| | Sequence | GATGGGAATAATCAACCCTAGTGGTGGTAGCACAAGCTACGCACAGAAGTTCCAGGGCAGAGTCACCATG |
| | | ACCAGGGACACGTCCACGAGCACAGTCTACATGGAGCTGAGCAGCCTGAGATCTGAGGACACGGCGGTGT |
| | | ACTACTGCGCCAGAGAGGTGATATCCAGGGTTAGCTACTTCGACCTATGGGGGAGAGGTACCTTGGTCAC |
| | | CGTCTCCTCA |
| 45 | BIIB-9-619_VH | QVQLVQSGAEVKKPGASVKVSCKASGYTFTSYYMHWVRQAPGQGLEWMGIINPSGGSTSYAQKFQGRVTM |
| | Amino Acid | TRDTSTSTVYMELSSLRSEDTAVYYCARDGPRVSDYYMDVWGKGTTVTVSS |
| | Sequence | |
| 46 | BIIB-9-619_VH | CAGGTGCAGCTGGTGCAGTCTGGGGCTGAGGTGAAGAAGCCTGGGGCCTCAGTGAAGGTTTCCTGCAAGG |
| | Nucleic Acid | CATCTGGATACACCTTCACCAGCTACTATATGCACTGGGTGCGACAGGCCCCTGGACAAGGGCTTGAGTG |
| | Sequence | GATGGGAATAATCAACCCTAGTGGTGGTAGCACAAGCTACGCACAGAAGTTCCAGGGCAGAGTCACCATG |
| | | ACCAGGGACACGTCCACGAGCACAGTCTACATGGAGCTGAGCAGCCTGAGATCTGAGGACACGGCGGTGT |
| | | ACTACTGCGCCAGAGACGGACCAAGAGTCAGTGACTACTACATGGACGTATGGGGCAAGGGTACAACTGT |
| | | CACCGTCTCCTCA |
| 47 | BIIB-9-626_VH | QVQLVQSGAEVKKPGASVKVSCKASGYTFTSYYMHWVRQAPGQGLEWMGVINPSGGSTSYAQKFQGRVTM |
| | Amino Acid | TRDTSTSTVYMELSSLRSEDTAVYYCARDLQYSMTYFDYWGQGTLVTVSS |
| | Sequence | |
| 48 | BIIB-9-626_VH | CAGGTGCAGCTGGTGCAGTCTGGGGCTGAGGTGAAGAAGCCTGGGGCCTCAGTGAAGGTTTCCTGCAAGG |
| | Nucleic Acid | CATCTGGATACACCTTCACCAGCTACTATATGCACTGGGTGCGACAGGCCCCTGGACAAGGGCTTGAGTG |
| | Sequence | TGATGGGAGTCATCAACCCTAGTGGGGTAGCACAAGCTACGCACAGAAGTTCCAGGGCAGAGTCACCATG |
| | | ACCAGGGACACGTCCACGAGCACAGTCTACATGGAGCTGAGCAGCCTGAGATCTGAGGACACGGCGGTGT |
| | | ACTACTGCGCCAGAGACTTGCAGTATAGCATGACATACTTCGACTACTGGGGACAGGGTACATTGGTCAC |
| | | CGTCTCCTCA |
| 49 | BIIB-9-883_VH | QVQLVQSGAEVKKPGASVKVSCKASGYTFTSYYMHWVRQAPGQGLEWMGIINPSGGSTSYAQKFQGRVTM |
| | Amino Acid | TRDTSTSTVYMELSSLRSEDTAVYYCARDGRLSYTWDRWGQGTLVTVSS |
| | Sequence | |
| 50 | BIIB-9-883_VH | CAGGTGCAGCTGGTGCAGTCTGGGGCTGAGGTGAAGAAGCCTGGGGCCTCAGTGAAGGTTTCCTGCAAGG |
| | Nucleic Acid | CATCTGGATACACCTTCACCAGCTACTATATGCACTGGGTGCGACAGGCCCCTGGACAAGGGCTTGAGTG |
| | Sequence | GATGGGAATAATCAACCCTAGTGGTGGTAGCACAAGCTACGCACAGAAGTTCCAGGGCAGAGTCACCATG |
| | | ACCAGGGACACGTCCACGAGCACAGTCTACATGGAGCTGAGCAGCCTGAGATCTGAGGACACGGCGGTGT |
| | | ACTACTGCGCCAGAGACGGCAGACTAAGCTACACCTGGGACAGATGGGGACAGGGTACATTGGTCACCGT |
| | | CTCCTCA |
| 51 | BIIB-9-419_VH | QVQLVQSGAEVKKPGASVKVSCKASGYTFTSYYMHWVRQAPGQGLEWMGIINPSGGSTSYAQKFQGRVTM |
| | Amino Acid | TRDTSTSTVYMELSSLRSEDTAVYYCAREPTFYASYFDLWGRGTLVTVS |
| | Sequence | |
| 52 | BIIB-9-419_VH | CAGGTGCAGCTGGTGCAGTCTGGGGCTGAGGTGAAGAAGCCTGGGGCCTCAGTGAAGGTTTCCTGCAAGG |
| | Nucleic Acid | CATCTGGATACACCTTCACCAGCTACTATATGCACTGGGTGCGACAGGCCCCTGGACAAGGGCTTGAGTG |
| | Sequence | GATGGGAATAATCAACCCTAGTGGTGGTAGCACAAGCTACGCACAGAAGTTCCAGGGCAGAGTCACCATG |
| | | ACCAGGGACACGTCCACGAGCACAGTCTACATGGAGCTGAGCAGCCTGAGATCTGAGGACACGGCGGTGT |
| | | ACTACTGCGCCAGAGAGCCTACCTTCTACGCCAGCTACTTCGACCTATGGGGGAGAGGTACCTTGGTCAC |
| | | CGTCTCCTCA |
| 53 | BIIB-9-451_VH | QLQLQESGPGLVKPSETLSLTCTVSGGSISSSSYYWGWIRQPPGKGLEWIGSISYSGSTYYNPSLKSRVT |
| | Amino Acid | ISVDTSKNQFSLKLSSVTAADTAVYYCARDSGGYYYQGFDYWGQGTLVTVSS |
| | Sequence | |
| 54 | BIIB-9-451_VH | CAGCTGCAGCTGCAGGAGTCGGGCCCAGGACTGGTGAAGCCTTCGGAGACCCTGTCCCTCACCTGCACTG |
| | Nucleic Acid | TCTCTGGTGGCTCCATCAGCAGTAGTAGTTACTACTGGGGCTGGATCCGCCAGCCCCCAGGGAAGGGGCT |
| | Sequence | GGAGTGGATTGGGAGTATCTCCTATAGTGGGAGCACCTACTACAACCCGTCCCTCAAGAGTCGAGTCACC |
| | | ATATCCGTAGACACGTCCAAGAACCAGTTCTCCCTGAAGCTGAGTTCTGTGACCGCCGCAGACACGGCGG |
| | | TGTACTACTGCGCCAGAGACTCAGGAGGATACTACTACCAGGGATTCGATTACTGGGGACAGGGTACATT |
| | | GGTCACCGTCTCCTCA |
| 55 | BIIB-9-473_VH | VQLLESGGGLVQPGGSLRLSCAASGFTFSSYAMSWVRQAPGKGLEWVSAISGSGGSTYYADSVKGRFTIS |
| | Amino Acid | RDNSKNTLYLQMNSLRAEDTAVYYCAKDRLRYSRWYDGMDVWGQGTTVTVSS |
| | Sequence | |
| 56 | BIIB-9-473_VH | GAGGTGCAGCTGTTGGAGTCTGGGGGAGGCTTGGTACAGCCTGGGGGGTCCCTGAGACTCTCCTGTGCAG |
| | Nucleic Acid | CCTCTGGATTCACCTTTAGCAGCTATGCCATGAGCTGGGTCCGCCAGGCTCCAGGGAAGGGGCTGGAGTG |
| | Sequence | GGTCTCAGCTATTAGTGGTAGTGGTGGTAGCACATACTACGCAGACTCCGTGAAGGGCCGGTTCACCATC |
| | | TCCAGAGACAATTCCAAGAACACGCTGTATCTGCAAATGAACAGCCTGAGAGCCGAGGACACGGCGGTGT |
| | | ACTACTGCGCAAAAGACAGGTTGAGATACAGCAGATGGTACGATGGGATGGATGTTTGGGGCCAGGGAAC |
| | | AACTGTCACCGTCTCCTCA |
| 57 | BIIB-9-565_VH | QLQLQESGPGLVKPSETLSLTCTVSGGSISSSSYYWGWIRQPPGKGLEWIGSIYYSGSTYYNPSLKSRVT |
| | Amino Acid | ISVDTSKNQFSLKLSSVTAADTAVYYCARAGMYSSYANWFDPWGQGTLVTVSS |
| | Sequence | |
| 58 | BIIB-9-565_VH | CAGCTGCAGCTGCAGGAGTCGGGCCCAGGACTGGTGAAGCCTTCGGAGACCCTGTCCCTCACCTGCACTG |
| | Nucleic Acid | TCTCTGGTGGCTCCATCAGCAGTAGTAGTTACTACTGGGGCTGGATCCGCCAGCCCCCAGGGAAGGGGCT |
| | Sequence | GGAGTGGATTGGGAGTATCTATTATAGTGGGAGCACCTACTACAACCCGTCCCTCAAGAGTCGAGTCACC |
| | | ATATCCGTAGACACGTCCAAGAACCAGTTCTCCCTGAAGCTGAGTTCTGTGACCGCCGCAGACACGGCGG |
| | | TGTACTACTGCGCCAGAGCTGGAATGTACTCCAGTTATGCTAACTGGTTTGACCCATGGGGACAGGGTAC |
| | | ATTGGTCACCGTCTCCTC |
| 59 | BIIB-9-573_VH | QLQLQESGPGLVKPSETLSLTCTVSGGSISSSSYYWGWIRQPPGKGLEWIGSIYYSGSTYYNPSLKSRVT |
| | Amino Acid | ISVDTSKNQFSLKLSSVTAADTAVYYCARESKTKGYLDLWGRGTLVTVSS |
| | Sequence | |
| 60 | BIIB-9-573_VH | CAGCTGCAGCTGCAGGAGTCGGGCCCAGGACTGGTGAAGCCTTCGGAGACCCTGTCCCTCACCTGCACTG |
| | Nucleic Acid | TCTCTGGTGGCTCCATCAGCAGTAGTAGTTACTACTGGGGCTGGATCCGCCAGCCCCCAGGGAAGGGGCT |
| | Sequence | GGAGTGGATTGGGAGTATCTATTATAGTGGGAGCACCTACTACAACCCGTCCCTCAAGAGTCGAGTCACC |
| | | ATATCCGTAGACACGTCCAAGAACCAGTTCTCCCTGAAGCTGAGTTCTGTGACCGCCGCAGACACGGCGG |
| | | TGTACTACTGCGCCAGAGAATCTAAGACCAAAGGGTACTTAGACCTATGGGGGAGAGGTACCTTGGTCAC |
| | | CGTCTCCTCA |
| 61 | BIIB-9-579_VH | QVQLVQSGAEVKKPGASVKVSCKASGYTFTSYYMVWVRQAPGQGLEWMGIINPSGGSTSYAQKFQGRVTM |
| | Amino Acid | TRDTSTSTVYMELSSLRSEDTAVYYCARGPWYSYYYMDVWGKGTTVTVSS |
| | Sequence | |
| 62 | BIIB-9-579_VH | CAGGTGCAGCTGGTGCAGTCTGGGGCTGAGGTGAAGAAGCCTGGGGCCTCAGTGAAGGTTTCCTGCAAGG |
| | Nucleic Acid | CATCTGGATACACCTTCACCAGCTACTATATGGTCTGGGTGCGACAGGCCCCTGGACAAGGGCTTGAGTG |
| | Sequence | GATGGGAATAATCAACCCTAGTGGTGGTAGCACAAGCTACGCACAGAAGTTCCAGGGCAGAGTCACCATG |
| | | ACCAGGGACACGTCCACGAGCACAGTCTACATGGAGCTGAGCAGCCTGAGATCTGAGGACACGGCGGTGT |
| | | ACTACTGCGCCAGAGGGCCTTGGTACAGTTATTACTACATGGACGTATGGGGCAAGGGTACAACTGTCAC |
| | | CGTCTCCTCA |
| 63 | BIIB-9-581_VH | QVQLVQSGAEVKKPGASVKVSCKASGYTFTSYYMHWVRQAPGQGLEWMGIINPSGGSTSYAQKFQGRVTM |
| | Amino Acid | TRDTSTSTVYMELSSLRSEDTAVYYCARDPLYYREGYVFDYWGQGTLVTVSS |
| | Sequence | |
| 64 | BIIB-9-581_VH | CAGGTGCAGCTGGTGCAGTCTGGGGCTGAGGTGAAGAAGCCTGGGGCCTCAGTGAAGGTTTCCTGCAAGG |
| | Nucleic Acid | CATCTGGATACACCTTCACCAGCTACTATATGCACTGGGTGCGACAGGCCCCTGGACAAGGGCTTGAGTG |
| | Sequence | GATGGGAATAATCAACCCTAGTGGTGGTAGCACAAGCTACGCACAGAAGTTCCAGGGCAGAGTCACCATG |
| | | ACCAGGGACACGTCCACGAGCACAGTCTACATGGAGCTGAGCAGCCTGAGATCTGAGGACACGGCGGTGT |
| | | ACTACTGCGCCAGAGATCCTTTGTACTACAGAGAAGGATACGTTTTCGATTACTGGGGACAGGGTACATT |
| | | GGTCACCGTCTCCTCA |
| 65 | BIIB-9-582_VH | QVQLVQSGAEVKKPGASVKVSCKASGYTFTSYYMVWVRQAPGQGLEWMGIINPSGGSTSYAQKFQGRVTM |
| | Amino Acid | TRDTSTSTVYMELSSLRSEDTAVYYCARAPTYFYSYGMDVWGQGTTVTVSS |
| | Sequence | |
| 66 | BIIB-9-582_VH | CAGGTGCAGCTGGTGCAGTCTGGGGCTGAGGTGAAGAAGCCTGGGGCCTCAGTGAAGGTTTCCTGCAAGG |
| | Nucleic Acid | CATCTGGATACACCTTCACCAGCTACTATATGGTCTGGGTGCGACAGGCCCCTGGACAAGGGCTTGAGTG |
| | Sequence | GATGGGAATAATCAACCCTAGTGGTGGTAGCACAAGCTACGCACAGAAGTTCCAGGGCAGAGTCACCATG |
| | | ACCAGGGACACGTCCACGAGCACAGTCTACATGGAGCTGAGCAGCCTGAGATCTGAGGACACGGCGGTGT |
| | | ACTACTGCGCCAGAGCCCCTACATACTTCTACAGCTACGGAATGGACGTATGGGGCCAGGGAACAACTGT |
| | | CACCGTCTCCTCA |
| 67 | BIIB-9-585_VH | QLQLQESGPGLVKPSETLSLTCTVSGGSISSSDYYWGWIRQPPGKGLEWIGSIYYSGSTYYNPSLKSRVT |
| | Amino Acid | ISVDTSKNQFSLKLSSVTAADTAVYYCAREVGTYYYGLDFWFDPWGQGTLVTVSS |
| | Sequence | |
| 68 | BIIB-9-585_VH | CAGCTGCAGCTGCAGGAGTCGGGCCCAGGACTGGTGAAGCCTTCGGAGACCCTGTCCCTCACCTGCACTG |
| | Nucleic Acid | TCTCTGGTGGCTCCATCAGCAGTAGTGACTACTACTGGGGCTGGATCCGCCAGCCCCCAGGGAAGGGGCT |
| | Sequence | GGAGTGGATTGGGAGTATCTATTATAGTGGGAGCACCTACTACAACCCGTCCCTCAAGAGTCGAGTCACC |
| | | ATATCCGTAGACACGTCCAAGAACCAGTTCTCCCTGAAGCTGAGTTCTGTGACCGCCGCAGACACGGCGG |
| | | TGTACTACTGCGCCAGAGAAGTCGGAACATACTACTACGGCTTAGACTTCTGGTTTGACCCCTGGGGACA |
| | | GGGTACATTGGTCACCGTCTCCTCA |
| 69 | BIIB-9-587_VH | QVQLVQSGAEVKKPGASVKVSCKASGYTFTSYYMHWVRQAPGQGLEWMGIINPSGGSTSYAQKFQGRVTM |
| | Amino Acid | TRDTSTSTVYMELSSLRSEDTAVYYCARGPPGYEYYMDVWGKGTTVTVSS |
| | Sequence | |
| 70 | BIIB-9-587_VH | CAGGTGCAGCTGGTGCAGTCTGGGGCTGAGGTGAAGAAGCCTGGGGCCTCAGTGAAGGTTTCCTGCAAGG |
| | Nucleic Acid | CATCTGGATACACCTTCACCAGCTACTATATGCACTGGGTGCGACAGGCCCCTGGACAAGGGCTTGAGTG |
| | Sequence | GATGGGAATAATCAACCCTAGTGGTGGTAGCACAAGCTACGCACAGAAGTTCCAGGGCAGAGTCACCATG |
| | | ACCAGGGACACGTCCACGAGCACAGTCTACATGGAGCTGAGCAGCCTGAGATCTGAGGACACGGCGGTGT |
| | | ACTACTGCGCCAGAGGACCGCCTGGATACGAGTACTACATGGACGTATGGGGCAAGGGAACAACTGTCAC |
| | | CGTCTCCTCA |
| 71 | BIIB-9-590_VH | QVQLVQSGAEVKKPGASVKVSCKASGYTFTSYYMHWVRQAPGQGLEWMGIINPSGGSTSYAQKFQGRVTM |
| | Amino Acid | TRDTSTSTVYMELSSLRSEDTAVYYCARDQEWAYYGMDVWGQGTTVTVSS |
| | Sequence | |
| 72 | BIIB-9-590_VH | CAGGTGCAGCTGGTGCAGTCTGGGGCTGAGGTGAAGAAGCCTGGGGCCTCAGTGAAGGTTTCCTGCAAGG |
| | Nucleic Acid | CATCTGGATACACCTTCACCAGCTACTATATGCACTGGGTGCGACAGGCCCCTGGACAAGGGCTTGAGTG |
| | Sequence | GATGGGAATAATCAACCCTAGTGGTGGTAGCACAAGCTACGCACAGAAGTTCCAGGGCAGAGTCACCATG |
| | | ACCAGGGACACGTCCACGAGCACAGTCTACATGGAGCTGAGCAGCCTGAGATCTGAGGACACGGCGGTGT |
| | | ACTACTGCGCCAGAGACCAGGAGTGGGCCTACTACGGCATGGACGTATGGGGCCAGGGAACAACTGTCAC |
| | | CGTCTCCTCA |
| 73 | BIIB-9-592_VH | QLQLQESGPGLVKPSETLSLTCTVSGGSISSNSYYWGWIRQPPGKGLEWIGSIYYSGSTYYNPSLKSRVT |
| | Amino Acid | ISVDTSKNQFSLKLSSVTAADTAVYYCARDSNYDSSGYALYYYGMDVWGQGTTVTVSS |
| | Sequence | |
| 74 | BIIB-9-592_VH | CAGCTGCAGCTGCAGGAGTCGGGCCCAGGACTGGTGAAGCCTTCGGAGACCCTGTCCCTCACCTGCACTG |
| | Nucleic Acid | TCTCTGGTGGCTCCATCAGCAGTAACAGTTACTACTGGGGCTGGATCCGCCAGCCCCCAGGGAAGGGGCT |
| | Sequence | GGAGTGGATTGGGAGTATCTATTATAGTGGGAGCACCTACTACAACCCGTCCCTCAAGAGTCGAGTCACC |
| | | ATATCCGTAGACACGTCCAAGAACCAGTTCTCCCTGAAGCTGAGTTCTGTGACCGCCGCAGACACGGCGG |
| | | TGTACTACTGCGCCAGAGACTCTAACTACGACAGCAGCGGATACGCCTTATACTACTATGGGATGGATGT |
| | | ATGGGGCCAGGGAACAACTGTCACCGTCTCCTCA |
| 75 | BIIB-9-606_VH | QVQLVQSGAEVKKPGASVKVSCKASGYTFTSYYMHWVRQAPGQGLEWMGIINPSGGSTSYAQKFQGRVTM |
| | Amino Acid | TRDTSTSTVYMELSSLRSEDTAVYYCARTKWSSSPYGMDVWGQGTTVTVSS |
| | Sequence | |
| 76 | BIIB-9-606_VH | CAGGTGCAGCTGGTGCAGTCTGGGGCTGAGGTGAAGAAGCCTGGGGCCTCAGTGAAGGTTTCCTGCAAGG |
| | Nucleic Acid | CATCTGGATACACCTTCACCAGCTACTATATGCACTGGGTGCGACAGGCCCCTGGACAAGGGCTTGAGTG |
| | Sequence | GATGGGAATAATCAACCCTAGTGGTGGTAGCACAAGCTACGCACAGAAGTTCCAGGGCAGAGTCACCATG |
| | | ACCAGGGACACGTCCACGAGCACAGTCTACATGGAGCTGAGCAGCCTGAGATCTGAGGACACGGCGGTGT |
| | | ACTACTGCGCCAGAACTAAATGGTCATCAAGCCCATACGGAATGGACGTATGGGGCCAGGGAACAACTGT |
| | | CACCGTCTCCTCA |
| 77 | BIIB-9-608_VH | QLQLQESGPGLVKPSETLSLTCTVSGGSISSSSYYWGWIRQPPGKGLEWIGSIYYSGSTYYNPSLKSRVT |
| | Amino Acid | ISVDTSKNQFSLKLSSVTAADTAVYYCARDRLETSEAGMDVWGQGTTVTVSS |
| | Sequence | |
| 78 | BIIB-9-608_VH | CAGCTGCAGCTGCAGGAGTCGGGCCCAGGACTGGTGAAGCCTTCGGAGACCCTGTCCCTCACCTGCACTG |
| | Nucleic Acid | TCTCTGGTGGCTCCATCAGCAGTAGTAGTTACTACTGGGGCTGGATCCGCCAGCCCCCAGGGAAGGGGCT |
| | Sequence | GGAGTGGATTGGGAGTATCTATTATAGTGGGAGCACCTACTACAACCCGTCCCTCAAGAGTCGAGTCACC |
| | | ATATCCGTAGACACGTCCAAGAACCAGTTCTCCCTGAAGCTGAGTTCTGTGACCGCCGCAGACACGGCGG |
| | | TGTACTACTGCGCCAGAGACAGGTTGGAAACAAGCGAGGCAGGAATGGACGTATGGGGCCAGGGAACAAC |
| | | TGTCACCGTCTCCTCA |
| 79 | BIIB-9-616_VH | QVQLVQSGAEVKKPGASVKVSCKASGYTFTSYYMHWVRQAPGQGLEWMGIINPSGGSTSYAQKFQGRVTM |
| | Amino Acid | TRDTSTSTVYMELSSLRSEDTAVYYCARGGSKYFFDLWGRGTLVTVSS |
| | Sequence | |
| 80 | BIIB-9-616_VH | CAGGTGCAGCTGGTGCAGTCTGGGGCTGAGGTGAAGAAGCCTGGGGCCTCAGTGAAGGTTTCCTGCAAGG |
| | Nucleic Acid | CATCTGGATACACCTTCACCAGCTACTATATGCACTGGGTGCGACAGGCCCCTGGACAAGGGCTTGAGTG |
| | Sequence | GATGGGAATAATCAACCCTAGTGGTGGTAGCACAAGCTACGCACAGAAGTTCCAGGGCAGAGTCACCATG |
| | | ACCAGGGACACGTCCACGAGCACAGTCTACATGGAGCTGAGCAGCCTGAGATCTGAGGACACGGCGGTGT |
| | | ACTACTGCGCCAGAGGCGGTTCTAAATACTTCTTCGACCTATGGGGGAGAGGTACCTTGGTCACCGTCTC |
| | | CTCA |
| 81 | BIIB-9-621_VH | QLQLQESGPGLVKPSETLSLTCTVSGGSISSSSYYWGWIRQPPGKGLEWIGSIYYSGSTYYNPSLKSRVT |
| | Amino Acid | ISVDTSKNQFSLKLSSVTAADTAVYYCARDGSISGSRFDYWGQGTLVTVSS |
| | Sequence | |
| 82 | BIIB-9-621_VH | CAGCTGCAGCTGCAGGAGTCGGGCCCAGGACTGGTGAAGCCTTCGGAGACCCTGTCCCTCACCTGCACTG |
| | Nucleic Acid | TCTCTGGTGGCTCCATCAGCAGTAGTAGTTACTACTGGGGCTGGATCCGCCAGCCCCCAGGGAAGGGGCT |
| | Sequence | GGAGTGGATTGGGAGTATCTATTATAGTGGGAGCACCTACTACAACCCGTCCCTCAAGAGTCGAGTCACC |
| | | ATATCCGTAGACACGTCCAAGAACCAGTTCTCCCTGAAGCTGAGTTCTGTGACCGCCGCAGACACGGCGG |
| | | TGTACTACTGCGCCAGAGACGGATCTATATCCGGATCTAGATTCGACTACTGGGGACAGGGTACATTGGT |
| | | CACCGTCTCCTCA |
| 83 | BIIB-9-622_VH | QVQLVQSGAEVKKPGASVKVSCKASGYTFTSYYMHWVRQAPGQGLEWMGIINPSGGSTSYAQKFQGRVTM |
| | Amino Acid | TRDTSTSTVYMELSSLRSEDTAVYYCARDGATTVSYLSFDIWGQGTMVTVSS |
| | Sequence | |
| 84 | BIIB-9-622_VH | CAGGTGCAGCTGGTGCAGTCTGGGGCTGAGGTGAAGAAGCCTGGGGCCTCAGTGAAGGTTTCCTGCAAGG |
| | Nucleic Acid | CATCTGGATACACCTTCACCAGCTACTATATGCACTGGGTGCGACAGGCCCCTGGACAAGGGCTTGAGTG |
| | Sequence | GATGGGAATAATCAACCCTAGTGGTGGTAGCACAAGCTACGCACAGAAGTTCCAGGGCAGAGTCACCATG |
| | | ACCAGGGACACGTCCACGAGCACAGTCTACATGGAGCTGAGCAGCCTGAGATCTGAGGACACGGCGGTGT |
| | | ACTACTGCGCCAGAGATGGCGCTACCACAGTAAGCTATTTGTCATTCGACATATGGGGTCAGGGTACAAT |
| | | GGTCACCGTCTCCTCA |
| 85 | BIIB-9-627_VH | QVQLVQSGAEVKKPGASVKVSCKASGYTFTSYYMHWVRQAPGQGLEWMGIINPSGGSTSYAQKFQGRVTM |
| | Amino Acid | TRDTSTSTVYMELSSLRSEDTAVYYCARADYDYWSGYGGLGMDVWGQGTTVTVSS |
| | Sequence | |
| 86 | BIIB-9-627_VH | CAGGTGCAGCTGGTGCAGTCTGGGGCTGAGGTGAAGAAGCCTGGGGCCTCAGTGAAGGTTTCCTGCAAGG |
| | Nucleic Acid | CATCTGGATACACCTTCACCAGCTACTATATGCACTGGGTGCGACAGGCCCCTGGACAAGGGCTTGAGTG |
| | Sequence | GATGGGAATAATCAACCCTAGTGGTGGTAGCACAAGCTACGCACAGAAGTTCCAGGGCAGAGTCACCATG |
| | | ACCAGGGACACGTCCACGAGCACAGTCTACATGGAGCTGAGCAGCCTGAGATCTGAGGACACGGCGGTGT |
| | | ACTACTGCGCCAGAGCTGACTACGACTACTGGAGCGGATACGGAGGTCTCGGAATGGACGTATGGGGCCA |
| | | GGGAACAACTGTCACCGTCTCCTCA |
| 87 | BIIB-9-1335_VH | EVQLVESGGGLVKPGGSLRLSCAASGFTFSSYDMHWVRQAPGKGLEWVSSISSGSSYIYYADSVKGRFTI |
| | Amino Acid | SRDNAKNSLYLQMNSLRAEDTAVYYCARDVGGYAGYYGMDVWGQGTTVTVSS |
| | Sequence | |
| 88 | BIIB-9-1335_VH | GAGGTGCAGCTGGTGGAGTCTGGGGGAGGCCTGGTCAAGCCTGGGGGGTCCCTGAGACTCTCCTGTGCAG |
| | Nucleic Acid | CCTCTGGATTCACCTTCAGTAGCTATGATATGCATTGGGTCCGCCAGGCTCCAGGGAAGGGGCTGGAGTG |
| | Sequence | GGTCTCATCCATTAGTAGTGGTAGTAGTTACATATACTACGCAGACTCAGTGAAGGGCCGATTCACCATC |
| | | TCCAGAGACAACGCCAAGAACTCACTGTATCTGCAAATGAACAGCCTGAGAGCCGAGGACACGGCGGTGT |
| | | ACTACTGCGCCAGAGATGTAGGAGGATACGCAGGGTACTACGGCATGGATGTATGGGGCCAGGGAACAAC |
| | | TGTCACCGTCTCCTCA |
| 89 | BIIB-9-1336_VH | EVQLVESGGGLVKPGGSLRLSCAASGFTFGSYDMNWVRQAPGKGLEWVSSISSGESYIYYAESVKGRFTI |
| | Amino Acid | SRDNAKNSLYLQMNSLRAEDTAVYYCARDVGGYAGYYGMDVWGQGTTVTVSS |
| | Sequence | |
| 90 | BIIB-9-1336_VH | GAGGTGCAGCTGGTGGAGTCTGGGGGAGGCCTGGTCAAGCCTGGGGGGTCCCTGAGACTCTCCTGTGCAG |
| | Nucleic Acid | CCTCTGGATTCACCTTCGGGAGCTATGATATGAACTGGGTCCGCCAGGCTCCAGGGAAGGGGCTGGAGTG |
| | Sequence | GGTCTCATCCATTAGTAGTGGTGAGAGTTACATATACTACGCAGAGTCAGTGAAGGGCCGATTCACCATC |
| | | TCCAGAGACAACGCCAAGAACTCACTGTATCTGCAAATGAACAGCCTGAGAGCCGAGGACACGGCGGTGT |
| | | ACTACTGCGCCAGAGATGTAGGAGGATACGCAGGGTACTACGGCATGGATGTATGGGGCCAGGGAACAAC |
| | | TGTCACCGTCTCCTCA |

Class II Antibodies - VH Sequences

| | | |
|---|---|---|
| 91 | BIIB-9-408_VH | QVQLVQSGAEVKKPGASVKVSCKASGYTFTSYYMHWVRQAPGQGLEWMGIINPSGGSTTYAQKFQGRVTM |
| | Amino Acid | TRDTSTSTVYMELSSLRSEDTAVYYCARDPGAYDDWSGYDDYGMDVWGQGTTVTVSS |
| | Sequence | |
| 92 | BIIB-9-408_VH | CAGGTGCAGCTGGTGCAGTCTGGGGCTGAGGTGAAGAAGCCTGGGGCCTCAGTGAAGGTTTCCTGCAAGG |
| | Nucleic Acid | CATCTGGATACACCTTCACCAGCTACTATATGCACTGGGTGCGACAGGCCCCTGGACAAGGGCTTGAGTG |
| | Sequence | GATGGGAATAATCAACCCTAGTGGTGGTAGCACAACCTACGCACAGAAGTTCCAGGGCAGAGTCACCATG |
| | | ACCAGGGACACGTCCACGAGCACAGTCTACATGGAGCTGAGCAGCCTGAGATCTGAGGACACGGCGGTGT |
| | | ACTACTGCGCCAGAGATCCAGGAGCCTACGACGACTGGAGCGGATATGATGATTATGGAATGGACGTATG |
| | | GGGCCAGGGAACAACTGTCACCGTCTCCTCA |
| 93 | BIIB-9-416_VH | QVQLVQSGAEVKKPGASVKVSCKASGYTFTSYYMHWVRQAPGQGLEWMGIINPSGGSTSYAQKFQGRVTM |
| | Amino Acid | TRDTSTSTVYMELSSLRSEDTAVYYCAREGPMLDYPTYSNWFDPWGQGTLVTVS |
| | Sequence | |
| 94 | BIIB-9-416_VH | CAGGTGCAGCTGGTGCAGTCTGGGGCTGAGGTGAAGAAGCCTGGGGCCTCAGTGAAGGTTTCCTGCAAGG |
| | Nucleic Acid | CATCTGGATACACCTTCACCAGCTACTATATGCACTGGGTGCGACAGGCCCCTGGACAAGGGCTTGAGTG |
| | Sequence | GATGGGAATAATCAACCCTAGTGGTGGTAGCACAAGCTACGCACAGAAGTTCCAGGGCAGAGTCACCATG |
| | | ACCAGGGACACGTCCACGAGCACAGTCTACATGGAGCTGAGCAGCCTGAGATCTGAGGACACGGCGGTGT |
| | | ACTACTGCGCCAGAGAAGGTCCTATGCTAGACTACCCAACCTACAGCAACTGGTTCGACCCATGGGGACA |
| | | GGGTACATTGGTCACCGTCTCCTCA |
| 95 | BIIB-9-629_VH | QVQLVQSGAEVKKPGASVKVSCKASGYTFTSYYMHWVRQAPGQGLEWMGVINPSGGSTSYAQKFQGRVTM |
| | Amino Acid | TRDTSTSTVYMELSSLRSEDTAVYYCARDPSQDYATGTGWFDPWGQGTLVTVSS |
| | Sequence | |
| 96 | BIIB-9-629_VH | CAGGTGCAGCTGGTGCAGTCTGGGGCTGAGGTGAAGAAGCCTGGGGCCTCAGTGAAGGTTTCCTGCAAGG |
| | Nucleic Acid | CATCTGGATACACCTTCACCAGCTACTATATGCACTGGGTGCGACAGGCCCCTGGACAAGGGCTTGAGTG |
| | Sequence | GATGGGAGTCATCAACCCTAGTGGTGGTAGCACAAGCTACGCACAGAAGTTCCAGGGCAGAGTCACCATG |
| | | ACCAGGGACACGTCCACGAGCACAGTCTACATGGAGCTGAGCAGCCTGAGATCTGAGGACACGGCGGTGT |
| | | ACTACTGCGCCAGAGATCCCTCTCAAGACTACGCAACCGGAACCGGTTGGTTCGATCCCTGGGGACAGGG |
| | | TACATTGGTCACCGTCTCCTCA |
| 97 | BIIB-9-885_VH | QVQLVQSGAEVKKPGASVKVSCKASGYTFTSYYMHWVRQAPGQGLEWMGIINPSGGSTSYAQKFQGRVTM |
| | Amino Acid | TRDTSTSTVYMELSSLRSEDTAVYYCAREGPMLDYPTYSNWFDPWGQGTLVTVSS |
| | Sequence | |
| 98 | BIIB-9-885_VH | CAGGTGCAGCTGGTGCAGTCTGGGGCTGAGGTGAAGAAGCCTGGGGCCTCAGTGAAGGTTTCCTGCAAGG |
| | Nucleic Acid | CATCTGGATACACCTTCACCAGCTACTATATGCACTGGGTGCGACAGGCCCCTGGACAAGGGCTTGAGTG |
| | Sequence | GATGGGAATAATCAACCCTAGTGGTGGTAGCACAAGCTACGCACAGAAGTTCCAGGGCAGAGTCACCATG |
| | | ACCAGGGACACGTCCACGAGCACAGTCTACATGGAGCTGAGCAGCCTGAGATCTGAGGACACGGCGGTGT |
| | | ACTACTGCGCCAGAGAAGGTCCTATGCTAGACTACCCAACCTACAGCAACTGGTTCGACCCATGGGGACA |
| | | GGGTACATTGGTCACCGTCTCCTCA |

Class III Antibodies - VH Sequences

| | | |
|---|---|---|
| 99 | BIIB-9-607_VH | QLQLQESGPGLVKPSETLSLTCTVSGGSISSSSYYWGWIRQPPGKGLEWIGSISYSGSTYYNPSLKSRVT |
| | Amino Acid | ISVDTSKNQFSLKLSSVTAADTAVYYCARDRGYSYEDFDLWGRGTLVTVS |
| | Sequence | |
| 100 | BIIB-9-607_VH | CAGCTGCAGCTGCAGGAGTCGGGCCCAGGACTGGTGAAGCCTTCGGAGACCCTGTCCCTCACCTGCACTG |
| | Nucleic Acid | TCTCTGGTGGCTCCATCAGCAGTAGTAGTTACTACTGGGGCTGGATCCGCCAGCCCCCAGGGAAGGGGCT |
| | Sequence | GGAGTGGATTGGGAGTATCTCCTATAGTGGGAGCACCTACTACAACCCGTCCCTCAAGAGTCGAGTCACC |
| | | ATATCCGTAGACACGTCCAAGAACCAGTTCTCCCTGAAGCTGAGTTCTGTGACCGCCGCAGACACGGCGG |
| | | TGTACTACTGCGCCAGAGATCGTGGATACAGCTACGAGGACTTCGACCTATGGGGGAGAGGTACCTTGGT |
| | | CACCGTCTCCTCA |
| 101 | BIIB-9-471_VH | QVQLQESGPGLVKPSQTLSLTCTVSGGSISSGGYYWSWIRQHPGKGLEWIGYIYYSGSTYYNPSLKSRVT |
| | Amino Acid | ISVDTSKNQFSLKLSSVTAADTAVYYCARSGVSGSGSDNWFDPWGQGTTVTVSS |
| | Sequence | |
| 102 | BIIB-9-471_VH | CAGGTGCAGCTGCAGGAGTCGGGCCCAGGACTGGTGAAGCCTTCACAGACCCTGTCCCTCACCTGTACTG |
| | Nucleic Acid | TCTCTGGTGGCTCCATCAGCAGTGGTGGTTACTACTGGAGCTGGATCCGCCAGCACCCAGGGAAGGGCCT |
| | Sequence | GGAGTGGATTGGGTACATCTATTACAGTGGGAGCACCTACTACAACCCGTCCCTCAAGAGTCGAGTTACC |
| | | ATATCAGTAGACACGTCTAAGAACCAGTTCTCCCTGAAGCTGAGTTCTGTGACCGCCGCAGACACGGCGG |
| | | TGTACTACTGCGCCAGATCAGGAGTGAGCGGATCGGGATCTGATAATTGGTTCGATCCATGGGGACAGGG |
| | | TACAACTGTCACCGTCTCCTCA |
| 103 | BIIB-9-472_VH | EVQLVESGGGLVKPGGSLRLSCAASGFTFSSYSMNWVRQAPGKGLEWVSSISSSSSYIYYADSVKGRFTI |
| | Amino Acid | SRDNAKNSLYLQMNSLRAEDTAVYYCARGGRYSGSWSWNIWGQGTMVTVSS |
| | Sequence | |
| 104 | BIIB-9-472_VH | GAGGTGCAGCTGGTGGAGTCTGGGGGAGGCCTGGTCAAGCCTGGGGGGTCCCTGAGACTCTCCTGTGCAG |
| | Nucleic Acid | CCTCTGGATTCACCTTCAGTAGCTATAGCATGAACTGGGTCCGCCAGGCTCCAGGGAAGGGGCTGGAGTG |
| | Sequence | GGTCTCATCCATTAGTAGTAGTAGTAGTTACATATACTACGCAGACTCAGTGAAGGGCCGATTCACCATC |
| | | TCCAGAGACAACGCCAAGAACTCACTGTATCTGCAAATGAACAGCCTGAGAGCCGAGGACACGGCGGTGT |
| | | ACTACTGCGCCAGAGGAGGTAGATACAGCGGCTCGTGGAGCTGGAACATATGGGGTCAGGGTACAATGGT |
| | | CACCGTCTCCTCA |
| 105 | BIIB-9-439_VH | QVQLVQSGAEVKKPGASVKVSCKASGYTFTSYYMHWVRQAPGQGLEWMGIINPSGGSTTYAQKFQGRVTM |
| | Amino Acid | TRDTSTSTVYMELSSLRSEDTAVYYCAREATESYYYMDVWGKGTTVTVSS |
| | Sequence | |
| 106 | BIIB-9-439_VH | CAGGTGCAGCTGGTGCAGTCTGGGGCTGAGGTGAAGAAGCCTGGGGCCTCAGTGAAGGTTTCCTGCAAGG |
| | Nucleic Acid | CATCTGGATACACCTTCACCAGCTACTATATGCACTGGGTGCGACAGGCCCCTGGACAAGGGCTTGAGTG |
| | Sequence | GATGGGAATAATCAACCCTAGTGGTGGTAGCACAACCTACGCACAGAAGTTCCAGGGCAGAGTCACCATG |
| | | ACCAGGGACACGTCCACGAGCACAGTCTACATGGAGCTGAGCAGCCTGAGATCTGAGGACACGGCGGTGT |
| | | ACTACTGCGCCAGAGAGGCTACAGAAAGCTACTACTACATGGACGTATGGGGCAAGGGTACAACTGTCAC |
| | | CGTCTCCTCA |
| 107 | BIIB-9-446_VH | QVQLVQSGAEVKKPGSSVKVSCKASGGTFSSYAISWVRQAPGQGLEWMGGIIPIFGTASYAQKFQGRVTI |
| | Amino Acid | TADESTSTAYMELSSLRSEDTAVYYCARGLEVGYYGYFDYWGQGTLVTVSS |
| | Sequence | |
| 108 | BIIB-9-446_VH | CAGGTGCAGCTGGTGCAGTCTGGGGCTGAGGTGAAGAAGCCTGGGTCCTCGGTGAAGGTCTCCTGCAAGG |
| | Nucleic Acid | CTTCTGGAGGCACCTTCAGCAGCTATGCTATCAGCTGGGTGCGACAGGCCCCTGGACAAGGGCTTGAGTG |
| | Sequence | GATGGGAGGGATCATCCCTATCTTTGGTACAGCAAGCTACGCACAGAAGTTCCAGGGCAGAGTCACGATT |
| | | ACCGCGGACGAATCCACGAGCACAGCCTACATGGAGCTGAGCAGCCTGAGATCTGAGGACACGGCGGTGT |
| | | ACTACTGCGCCAGAGGGTTGGAAGTGGGATATTATGGATACTTTGATTACTGGGGACAGGGTACATTGGT |
| | | CACCGTCTCCTCA |
| 109 | BIIB-9-568_VH | QLQLQESGPGLVKPSETLSLTCTVSGGSISSSSYYWGWIRQPPGKGLEWIGSIYYSGSTYYNPSLKSRVT |
| | Amino Acid | ISVDTSKNQFSLKLSSVTAADTAVYYCARDLGYAATYFDLWGRGTLVTVSS |
| | Sequence | |
| 110 | BIIB-9-568_VH | CAGCTGCAGCTGCAGGAGTCGGGCCCAGGACTGGTGAAGCCTTCGGAGACCCTGTCCCTCACCTGCACTG |
| | Nucleic Acid | TCTCTGGTGGCTCCATCAGCAGTAGTAGTTACTACTGGGGCTGGATCCGCCAGCCCCCAGGGAAGGGGCT |
| | Sequence | GGAGTGGATTGGGAGTATCTATTATAGTGGGAGCACCTACTACAACCCGTCCCTCAAGAGTCGAGTCACC |
| | | ATATCCGTAGACACGTCCAAGAACCAGTTCTCCCTGAAGCTGAGTTCTGTGACCGCCGCAGACACGGCGG |
| | | TGTACTACTGCGCCAGAGACTTGGGATACGCAGCTACCTACTTCGACCTATGGGGGAGAGGTACCTTGGT |
| | | CACCGTCTCCTCA |
| 111 | BIIB-9-615_VH | QVQLVQSGAEVKKPGASVKVSCKASGYTFTSYYMHWVRQAPGQGLEWMGIINPSGGSTSYAQKFQGRVTM |
| | Amino Acid | TRDTSTSTVYMELSSLRSEDTAVYYCARDSPSSSSYWSLDLWGRGTLVTVSS |
| | Sequence | |
| 112 | BIIB-9-615_VH | CAGGTGCAGCTGGTGCAGTCTGGGGCTGAGGTGAAGAAGCCTGGGGCCTCAGTGAAGGTTTCCTGCAAGG |
| | Nucleic Acid | CATCTGGATACACCTTCACCAGCTACTATATGCACTGGGTGCGACAGGCCCCTGGACAAGGGCTTGAGTG |
| | Sequence | GATGGGAATAATCAACCCTAGTGGTGGTAGCACAAGCTACGCACAGAAGTTCCAGGGCAGAGTCACCATG |
| | | ACCAGGGACACGTCCACGAGCACAGTCTACATGGAGCTGAGCAGCCTGAGATCTGAGGACACGGCGGTGT |
| | | ACTACTGCGCCAGAGACTCTCCTAGCAGCAGCTCGTACTGGAGTTTAGACCTATGGGGGAGAGGTACCTT |
| | | GGTCACCGTCTCCTCA |
| 113 | BIIB-9-628_VH | QVQLVQSGAEVKKPGASVKVSCKASGYTFTSYYMHWVRQAPGQGLEWMGIINPSGGSTSYAQKFQGRVTM |
| | Amino Acid | TRDTSTSTVYMELSSLRSEDTAVYYCAREPIAYGATLDLWGRGTLVTVSS |
| | Sequence | |
| 114 | BIIB-9-628_VH | CAGGTGCAGCTGGTGCAGTCTGGGGCTGAGGTGAAGAAGCCTGGGGCCTCAGTGAAGGTTTCCTGCAAGG |
| | Nucleic Acid | CATCTGGATACACCTTCACCAGCTACTATATGCACTGGGTGCGACAGGCCCCTGGACAAGGGCTTGAGTG |
| | Sequence | GATGGGAATAATCAACCCTAGTGGTGGTAGCACAAGCTACGCACAGAAGTTCCAGGGCAGAGTCACCATG |
| | | ACCAGGGACACGTCCACGAGCACAGTCTACATGGAGCTGAGCAGCCTGAGATCTGAGGACACGGCGGTGT |
| | | ACTACTGCGCCAGAGAGCCTATAGCCTACGGTGCTACCTTAGACCTATGGGGGAGAGGTACCTTGGTCAC |
| | | CGTCTCCTCA |
| 115 | BIIB-9-882_VH | QVQLVQSGAEVKKPGASVKVSCKASGYTFTSYYMHWVRQAPGQGLEWMGIINPSGGSTSYAQKFQGRVTM |
| | Amino Acid | TRDTSTSTVYMELSSLRSEDTAVYYCARGPTDSSGYLDMDVWGKGTTVTVSS |
| | Sequence | |
| 116 | BIIB-9-882_VH | CAGGTGCAGCTGGTGCAGTCTGGGGCTGAGGTGAAGAAGCCTGGGGCCTCAGTGAAGGTTTCCTGCAAGG |
| | Nucleic Acid | CATCTGGATACACCTTCACCAGCTACTATATGCACTGGGTGCGACAGGCCCCTGGACAAGGGCTTGAGTG |
| | Sequence | GATGGGAATAATCAACCCTAGTGGTGGTAGCACAAGCTACGCACAGAAGTTCCAGGGCAGAGTCACCATG |
| | | ACCAGGGACACGTCCACGAGCACAGTCTACATGGAGCTGAGCAGCCTGAGATCTGAGGACACGGCGGTGT |
| | | ACTACTGCGCCAGAGGACCCACTGACAGCAGCGGATACTTGGACATGGACGTATGGGGCAAGGGTACAAC |
| | | TGTCACCGTCTCCTCA |
| 117 | BIIB-9-884_VH | QLQLQESGPGLVKPSETLSLTCTVSGGSISSSDYYWGWIRQPPGKGLEWIGSIYYSGSTYYNPSLKSRVT |
| | Amino Acid | ISVDTSKNQFSLKLSSVTAADTAVYYCARSPRHKVRGPNWFDPWGQGTLVTVSS |
| | Sequence | |
| 118 | BIIB-9-884_VH | CAGCTGCAGCTGCAGGAGTCGGGCCCAGGACTGGTGAAGCCTTCGGAGACCCTGTCCCTCACCTGCACTG |
| | Amino Acid | TCTCTGGTGGCTCCATCAGCAGTAGTGACTACTACTGGGGCTGGATCCGCCAGCCCCCAGGGAAGGGGCT |
| | Sequence | GGAGTGGATTGGGAGTATCTATTATAGTGGGAGCACCTACTACAACCCGTCCCTCAAGAGTCGAGTCACC |
| | | ATATCCGTAGACACGTCCAAGAACCAGTTCTCCCTGAAGCTGAGTTCTGTGACCGCCGCAGACACGGCGG |
| | | TGTACTACTGCGCCAGATCACCTAGGCACAAAGTGCGTGGCCCCAATTGGTTTGATCCATGGGGACAGGG |
| | | TACATTGGTCACCGTCTCCTCA |
| 119 | BIIB-9-886_VH | QVQLVQSGAEVKKPGASVKVSCKASGYTFTSYYMHWVRQAPGQGLEWMGIINPSGGSTSYAQKFQGRVTM |
| | Amino Acid | TRDTSTSTVYMELSSLRSEDTAVYYCARDPAHSYLDAFDIWGQGTMVTVSS |
| | Sequence | |
| 120 | BIIB-9-886_VH | CAGGTGCAGCTGGTGCAGTCTGGGGCTGAGGTGAAGAAGCCTGGGGCCTCAGTGAAGGTTTCCTGCAAGG |
| | Nucleic Acid | CATCTGGATACACCTTCACCAGCTACTATATGCACTGGGTGCGACAGGCCCCTGGACAAGGGCTTGAGTG |
| | Sequence | GATGGGAATAATCAACCCTAGTGGTGGTAGCACAAGCTACGCACAGAAGTTCCAGGGCAGAGTCACCATG |
| | | ACCAGGGACACGTCCACGAGCACAGTCTACATGGAGCTGAGCAGCCTGAGATCTGAGGACACGGCGGTGT |
| | | ACTACTGCGCCAGAGATCCCGCTCACTCCTACCTAGACGCCTTTGATATTTGGGGTCAGGGTACAATGGT |
| | | CACCGTCTCCTCA |
| 121 | BIIB-9-887_VH | QVQLVQSGAEVKKPGASVKVSCKASGYTFTSYYMVWVRQAPGQGLEWMGIINPSGGSTSYAQKFQGRVTM |
| | Amino Acid | TRDTSTSTVYMELSSLRSEDTAVYYCARDAEAHWIPGMDVWGQGTTVTVSS |
| | Sequence | |
| 122 | BIIB-9-887_VH | CAGGTGCAGCTGGTGCAGTCTGGGGCTGAGGTGAAGAAGCCTGGGGCCTCAGTGAAGGTTTCCTGCAAGG |
| | Nucleic Acid | CATCTGGATACACCTTCACCAGCTACTATATGGTCTGGGTGCGACAGGCCCCTGGACAAGGGCTTGAGTG |
| | Sequence | GATGGGAATAATCAACCCTAGTGGTGGTAGCACAAGCTACGCACAGAAGTTCCAGGGCAGAGTCACCATG |
| | | ACCAGGGACACGTCCACGAGCACAGTCTACATGGAGCTGAGCAGCCTGAGATCTGAGGACACGGCGGTGT |
| | | ACTACTGCGCCAGAGATGCTGAAGCACACTGGATCCCCGGAATGGACGTATGGGGCCAGGGAACAACTGT |
| | | CACCGTCTCCTCA |
| 123 | BIIB-9-888_VH | QVQLVQSGAEVKKPGASVKVSCKASGYTFTSYYMHWVRQAPGQGLEWMGIINPSGGSTSYAQKFQGRVTM |
| | Amino Acid | TRDTSTSTVYMELSSLRSEDTAVYYCARGPTDSSGYLDMDVWGKGTTVTVSS |
| | Sequence | |
| 124 | BIIB-9-888_VH | CAGGTGCAGCTGGTGCAGTCTGGGGCTGAGGTGAAGAAGCCTGGGGCCTCAGTGAAGGTTTCCTGCAAGG |
| | Nucleic Acid | CATCTGGATACACCTTCACCAGCTACTATATGCACTGGGTGCGACAGGCCCCTGGACAAGGGCTTGAGTG |
| | Sequence | GATGGGAATAATCAACCCTAGTGGTGGTAGCACAAGCTACGCACAGAAGTTCCAGGGCAGAGTCACCATG |
| | | ACCAGGGACACGTCCACGAGCACAGTCTACATGGAGCTGAGCAGCCTGAGATCTGAGGACACGGCGGTGT |
| | | ACTACTGCGCCAGAGGACCCACTGACAGCAGCGGATACTTGGACATGGACGTATGGGGCAAGGGTACAAC |
| | | TGTCACCGTCTCCTCA |
| 125 | BIIB-9-889_VH | QLQLQESGPGLVKPSETLSLTCTVSGGSISSSSYYWGWIRQPPGKGLEWIGSIYYSGSTYYNPSLKSRVT |
| | Amino Acid | ISVDTSKNQFSLKLSSVTAADTAVYYCARDVGWYTEYFDLWGRGTLVTVSS |
| | Sequence | |
| 126 | BIIB-9-889_VH | CAGCTGCAGCTGCAGGAGTCGGGCCCAGGACTGGTGAAGCCTTCGGAGACCCTGTCCCTCACCTGCACTG |
| | Nucleic Acid | TCTCTGGTGGCTCCATCAGCAGTAGTAGTTACTACTGGGGCTGGATCCGCCAGCCCCCAGGGAAGGGGCT |
| | Sequence | GGAGTGGATTGGGAGTATCTATTATAGTGGGAGCACCTACTACAACCCGTCCCTCAAGAGTCGAGTCACC |
| | | ATATCCGTAGACACGTCCAAGAACCAGTTCTCCCTGAAGCTGAGTTCTGTGACCGCCGCAGACACGGCGG |
| | | TGTACTACTGCGCCAGAGATGTAGGATGGTACACCGAATACTTCGACCTATGGGGGAGAGGTACCTTGGT |
| | | CACCGTCTCCTCA |
| 127 | BIIB-9-433_VH | QLQLQESGPGLVKPSETLSLTCTVSGGSISSSRYYWGWIRQPPGKGLEWIGSIYYSGSTYYNPSLKSRVT |
| | Amino Acid | ISVDTSKNQFSLKLSSVTAADTAVYYCARDAGYSAELFDYWGQGTLVTVSS |
| | Sequence | |
| 128 | BIIB-9-433_VH | CAGCTGCAGCTGCAGGAGTCGGGCCCAGGACTGGTGAAGCCTTCGGAGACCCTGTCCCTCACCTGCACTG |
| | Nucleic Acid | TCTCTGGTGGCTCCATCAGCAGTAGTCGCTACTACTGGGGCTGGATCCGCCAGCCCCCAGGGAAGGGGCT |
| | Sequence | GGAGTGGATTGGGAGTATCTATTATAGTGGGAGCACCTACTACAACCCGTCCCTCAAGAGTCGAGTCACC |
| | | ATATCCGTAGACACGTCCAAGAACCAGTTCTCCCTGAAGCTGAGTTCTGTGACCGCCGCAGACACGGCGG |
| | | TGTACTACTGCGCCAGAGACGCAGGATACAGCGCAGAGTTGTTCGACTACTGGGGACAGGGTACATTGGT |
| | | CACCGTCTCCTCA |
| 129 | BIIB-9-445_VH | QVQLVQSGAEVKKPGASVKVSCKASGYTFTSYYIHWVRQAPGQGLEWMGIINPSGGSTSYAQKFQGRVTM |
| | Amino Acid | TRDTSTSTVYMELSSLRSEDTAVYYCARDVGQDYWFDLWGRGTLVTVSS |
| | Sequence | |
| 130 | BIIB-9-445_VH | CAGGTGCAGCTGGTGCAGTCTGGGGCTGAGGTGAAGAAGCCTGGGGCCTCAGTGAAGGTTTCCTGCAAGG |
| | Nucleic Acid | CATCTGGATACACCTTCACCAGCTACTATATCCACTGGGTGCGACAGGCCCCTGGACAAGGGCTTGAGTG |
| | Sequence | GATGGGAATAATCAACCCTAGTGGTGGTAGCACAAGCTACGCACAGAAGTTCCAGGGCAGAGTCACCATG |
| | | ACCAGGGACACGTCCACGAGCACAGTCTACATGGAGCTGAGCAGCCTGAGATCTGAGGACACGGCGGTGT |
| | | ACTACTGCGCCAGAGATGTAGGACAAGACTACTGGTTCGACCTATGGGGGAGAGGTACCTTGGTCACCGT |
| | | CTCCTCA |
| 131 | BIIB-9-470_VH | EVQLVESGGGLVQPGGSLRLSCAASGFTFSSYWMSWVRQAPGKGLEWVANIKQDGSEKYYVDSVKGRFTI |
| | Amino Acid | SRDNAKNSLYLQMNSLRAEDTAVYYCARDAGIAWALDYWGQGTLVTVS |
| | Sequence | |
| 132 | BIIB-9-470_VH | GAGGTGCAGCTGGTGGAGTCTGGGGGAGGCTTGGTCCAGCCTGGGGGGTCCCTGAGACTCTCCTGTGCAG |
| | Nucleic Acid | CCTCTGGATTCACCTTTAGTAGCTATTGGATGAGCTGGGTCCGCCAGGCTCCAGGGAAGGGGCTGGAGTG |
| | Sequence | GGTGGCCAACATAAAGCAAGATGGAAGTGAGAAATACTATGTGGACTCTGTGAAGGGCCGATTCACCATC |
| | | TCCAGAGACAACGCCAAGAACTCACTGTATCTGCAAATGAACAGCCTGAGAGCCGAGGACACGGCGGTGT |
| | | ACTACTGCGCCAGAGATGCTGGCATAGCCTGGGCCTTAGATTACTGGGGACAGGGTACATTGGTCACCGT |
| | | CTCCTCA |
| 133 | BIIB-9-625_VH | QLQLQESGPGLVKPSETLSLTCTVSGGSISSSSYAWGWIRQPPGKGLEWIGSIYYSGSTYYNPSLKSRVT |
| | Amino Acid | ISVDTSKNQFSLKLSSVTAADTAVYYCARDRGWYTEVLDIWGQGTMVTVSS |
| | Sequence | |
| 134 | BIIB-9-625_VH | CAGCTGCAGCTGCAGGAGTCGGGCCCAGGACTGGTGAAGCCTTCGGAGACCCTGTCCCTCACCTGCACTG |
| | Nucleic Acid | TCTCTGGTGGCTCCATCAGCAGTAGTAGTTACGCATGGGGCTGGATCCGCCAGCCCCCAGGGAAGGGGCT |
| | Sequence | GGAGTGGATTGGGAGTATCTATTATAGTGGGAGCACCTACTACAACCCGTCCCTCAAGAGTCGAGTCACC |
| | | ATATCCGTAGACACGTCCAAGAACCAGTTCTCCCTGAAGCTGAGTTCTGTGACCGCCGCAGACACGGCGG |
| | | TGTACTACTGCGCCAGAGATCGTGGATGGTACACCGAAGTGTTAGACATATGGGGTCAGGGTACAATGGT |
| | | CACCGTCTCCTCA |
| 135 | BIIB-9-1264_VH | QVQLVQSGAEVKKPGASVKVSCKASGYTFTSYYMHWVRQAPGQGLEWMGIINPSGGSTSYAQKFQGRVTM |
| | Amino Acid | TRDTSTSTVYMELSSLRSEDTAVYYCARDGDSSVYAFDYWGQGTLVTVSS |
| | Sequence | |
| 136 | BIIB-9-1264_VH | CAGGTGCAGCTGGTGCAGTCTGGGGCTGAGGTGAAGAAGCCTGGGGCCTCAGTGAAGGTTTCCTGCAAGG |
| | Nucleic Acid | CATCTGGATACACCTTCACCAGCTACTATATGCACTGGGTGCGACAGGCCCCTGGACAAGGGCTTGAGTG |
| | Sequence | GATGGGAATAATCAACCCTAGTGGTGGTAGCACAAGCTACGCACAGAAGTTCCAGGGCAGAGTCACCATG |
| | | ACCAGGGACACGTCCACGAGCACAGTCTACATGGAGCTGAGCAGCCTGAGATCTGAGGACACGGCGGTGT |
| | | ACTACTGCGCCAGAGACGGAGACAGCAGCGTGTACGCCTTCGATTATTGGGGACAGGGTACATTGGTCAC |
| | | CGTCTCCTCA |
| 137 | BIIB-9-1265_VH | QLQLQESGPGLVKPSETLSLTCTVSGGSISSSSYYWGWIRQPPGKGLEWIGSIYYSGSTYYNPSLKSRVT |
| | Amino Acid | ISVDTSKNQFSLKLSSVTAADTAVYYCARDGRHYYELFDYWGQGTLVTVSS |
| | Sequence | |
| 138 | BIIB-9-1265_VH | CAGCTGCAGCTGCAGGAGTCGGGCCCAGGACTGGTGAAGCCTTCGGAGACCCTGTCCCTCACCTGCACTG |
| | Nucleic Acid | TCTCTGGTGGCTCCATCAGCAGTAGTAGTTACTACTGGGGCTGGATCCGCCAGCCCCCAGGGAAGGGGCT |
| | Sequence | GGAGTGGATTGGGAGTATCTATTATAGTGGGAGCACCTACTACAACCCGTCCCTCAAGAGTCGAGTCACC |
| | | ATATCCGTAGACACGTCCAAGAACCAGTTCTCCCTGAAGCTGAGTTCTGTGACCGCCGCAGACACGGCGG |
| | | TGTACTACTGCGCCAGAGACGGCAGACACTACTACGAGTTGTTCGACTACTGGGGACAGGGTACATTGGT |
| | | CACCGTCTCCTCA |
| 139 | BIIB-9-1266_VH | QVQLVQSGAEVKKPGASVKVSCKASGYTFTSYYMHWVRQAPGQGLEWMGIINPSGGSTSYAQKFQGRVTM |
| | Amino Acid | TRDTSTSTVYMELSSLRSEDTAVYYCARDHGWAIYGMDVWGQGTTVTVSS |
| | Sequence | |
| 140 | BIIB-9-1266_VH | CAGGTGCAGCTGGTGCAGTCTGGGGCTGAGGTGAAGAAGCCTGGGGCCTCAGTGAAGGTTTCCTGCAAGG |
| | Nucleic Acid | CATCTGGATACACCTTCACCAGCTACTATATGCACTGGGTGCGACAGGCCCCTGGACAAGGGCTTGAGTG |
| | Sequence | GATGGGAATAATCAACCCTAGTGGTGGTAGCACAAGCTACGCACAGAAGTTCCAGGGCAGAGTCACCATG |
| | | ACCAGGGACACGTCCACGAGCACAGTCTACATGGAGCTGAGCAGCCTGAGATCTGAGGACACGGCGGTGT |
| | | ACTACTGCGCAAGAGACCACGGATGGGCCATCTACGGAATGGACGTATGGGGCCAGGGAACAACTGTCAC |
| | | CGTCTCCTCA |
| 141 | BIIB-9-1267_VH | QVQLVQSGAEVKKPGASVKVSCKASGYTFTSYYMHWVRQAPGQGLEWMGIINPSGGSTSYAQKFQGRVTM |
| | Amino Acid | TRDTSTSTVYMELSSLRSEDTAVYYCARDHGWAIYGMDVWGQGTTVTVSS |
| | Sequence | |
| 142 | BIIB-9-1267_VH | CAGGTGCAGCTGGTGCAGTCTGGGGCTGAGGTGAAGAAGCCTGGGGCCTCAGTGAAGGTTTCCTGCAAGG |
| | Nucleic Acid | CATCTGGATACACCTTCACCAGCTACTATATGCACTGGGTGCGACAGGCCCCTGGACAAGGGCTTGAGTG |
| | Sequence | GATGGGAATAATCAACCCTAGTGGTGGTAGCACAAGCTACGCACAGAAGTTCCAGGGCAGAGTCACCATG |
| | | ACCAGGGACACGTCCACGAGCACAGTCTACATGGAGCTGAGCAGCCTGAGATCTGAGGACACGGCGGTGT |
| | | ACTACTGCGCAAGAGACCACGGATGGGCCATCTACGGAATGGACGTATGGGGCCAGGGAACAACTGTCAC |
| | | CGTCTCCTCA |
| 143 | BIIB-9-1268_VH | QVQLVQSGAEVKKPGASVKVSCKASGYTFTSYYMHWVRQAPGQGLEWMGIINPSGGSTSYAQKFQGRVTM |
| | Amino Acid | TRDTSTSTVYMELSSLRSEDTAVYYCARDPPSWYVFDIWGQGTMVTVSS |
| | Sequence | |
| 144 | BIIB-9-1268_VH | CAGGTGCAGCTGGTGCAGTCTGGGGCTGAGGTGAAGAAGCCTGGGGCCTCAGTGAAGGTTTCCTGCAAGG |
| | Nucleic Acid | CATCTGGATACACCTTCACCAGCTACTATATGCACTGGGTGCGACAGGCCCCTGGACAAGGGCTTGAGTG |
| | Sequence | GATGGGAATAATCAACCCTAGTGGTGGTAGCACAAGCTACGCACAGAAGTTCCAGGGCAGAGTCACCATG |
| | | ACCAGGGACACGTCCACGAGCACAGTCTACATGGAGCTGAGCAGCCTGAGATCTGAGGACACGGCGGTGT |
| | | ACTACTGCGCCAGAGACCCACCTAGTTGGTACGTATTCGACATATGGGGTCAGGGTACAATGGTCACCGT |
| | | CTCCTCA |
| 145 | BIIB-9-1269_VH | QVQLVQSGAEVKKPGASVKVSCKASGYTFTSYYMHWVRQAPGQGLEWMGIINPSGGSTSYAQKFQGRVTM |
| | Amino Acid | TRDTSTSTVYMELSSLRSEDTAVYYCARDRGQYYHFDLWGRGTLVTVSS |
| | Sequence | |
| 146 | BIIB-9-1269_VH | CAGGTGCAGCTGGTGCAGTCTGGGGCTGAGGTGAAGAAGCCTGGGGCCTCAGTGAAGGTTTCCTGCAAGG |
| | Nucleic Acid | CATCTGGATACACCTTCACCAGCTACTATATGCACTGGGTGCGACAGGCCCCTGGACAAGGGCTTGAGTG |
| | Sequence | GATGGGAATAATCAACCCTAGTGGTGGTAGCACAAGCTACGCACAGAAGTTCCAGGGCAGAGTCACCATG |
| | | ACCAGGGACACGTCCACGAGCACAGTCTACATGGAGCTGAGCAGCCTGAGATCTGAGGACACGGCGGTGT |
| | | ACTACTGCGCCAGAGATCGTGGACAATACTACCACTTCGACCTATGGGGGAGAGGTACCTTGGTCACCGT |
| | | CTCCTCA |
| 147 | BIIB-9-1270_VH | QVQLVQSGAEVKKPGASVKVSCKASGYTFTSYYMHWVRQAPGQGLEWMGIINPSGGSTSYAQKFQGRVTM |
| | Amino Acid | TRDTSTSTVYMELSSLRSEDTAVYYCARDTGGYAFDIWGQGTLVTVSS |
| | Sequence | |
| 148 | BIIB-9-1270_VH | CAGGTGCAGCTGGTGCAGTCTGGGGCTGAGGTGAAGAAGCCTGGGGCCTCAGTGAAGGTTTCCTGCAAGG |
| | Nucleic Acid | CATCTGGATACACCTTCACCAGCTACTATATGCACTGGGTGCGACAGGCCCCTGGACAAGGGCTTGAGTG |
| | Sequence | GATGGGAATAATCAACCCTAGTGGTGGTAGCACAAGCTACGCACAGAAGTTCCAGGGCAGAGTCACCATG |
| | | ACCAGGGACACGTCCACGAGCACAGTCTACATGGAGCTGAGCAGCCTGAGATCTGAGGACACGGCGGTGT |
| | | ACTACTGCGCCAGAGACACGGGAGGATACGCCTTTGATATTTGGGGACAGGGTACATTGGTCACCGTCTC |
| | | CTCA |
| 149 | BIIB-9-1271_VH | QVQLVQSGAEVKKPGASVKVSCKASGYTFTSYYMHWVRQAPGQGLEWMGIINPSGGSTSYAQKFQGRVTM |
| | Amino Acid | TRDTSTSTVYMELSSLRSEDTAVYYCARDTGGYAFDIWGQGTLVTVSS |
| | Sequence | |
| 150 | BIIB-9-1271_VH | CAGGTGCAGCTGGTGCAGTCTGGGGCTGAGGTGAAGAAGCCTGGGGCCTCAGTGAAGGTTTCCTGCAAGG |
| | Nucleic Acid | CATCTGGATACACCTTCACCAGCTACTATATGCACTGGGTGCGACAGGCCCCTGGACAAGGGCTTGAGTG |
| | Sequence | GATGGGAATAATCAACCCTAGTGGTGGTAGCACAAGCTACGCACAGAAGTTCCAGGGCAGAGTCACCATG |
| | | ACCAGGGACACGTCCACGAGCACAGTCTACATGGAGCTGAGCAGCCTGAGATCTGAGGACACGGCGGTGT |
| | | ACTACTGCGCCAGAGACACGGGAGGATACGCCTTTGATATTTGGGGACAGGGTACATTGGTCACCGTCTC |
| | | CTCA |
| 151 | BIIB-9-1272_VH | QVQLVQSGAEVKKPGASVKVSCKASGYTFTSYYMHWVRQAPGQGLEWMGIINPSGGSTSYAQKFQGRVTM |
| | Amino Acid | TRDTSTSTVYMELSSLRSEDTAVYYCARDTGGYAFDIWGQGTLVTVSS |
| | Sequence | |
| 152 | BIIB-9-1272_VH | CAGGTGCAGCTGGTGCAGTCTGGGGCTGAGGTGAAGAAGCCTGGGGCCTCAGTGAAGGTTTCCTGCAAGG |
| | Nucleic Acid | CATCTGGATACACCTTCACCAGCTACTATATGCACTGGGTGCGACAGGCCCCTGGACAAGGGCTTGAGTG |
| | Sequence | GATGGGAATAATCAACCCTAGTGGTGGTAGCACAAGCTACGCACAGAAGTTCCAGGGCAGAGTCACCATG |
| | | ACCAGGGACACGTCCACGAGCACAGTCTACATGGAGCTGAGCAGCCTGAGATCTGAGGACACGGCGGTGT |
| | | ACTACTGCGCCAGAGACACGGGAGGATACGCCTTTGATATTTGGGGACAGGGTACATTGGTCACCGTCTC |
| | | CTCA |
| 153 | BIIB-9-1273_VH | QVQLVQSGAEVKKPGASVKVSCKASGYTFTSYYMHWVRQAPGQGLEWMGIINPSGGSTSYAQKFQGRVTM |
| | Amino Acid | TRDTSTSTVYMELSSLRSEDTAVYYCARDTGGYAFDIWGQGTLVTVSS |
| | Sequence | |
| 154 | BIIB-9-1273_VH | CAGGTGCAGCTGGTGCAGTCTGGGGCTGAGGTGAAGAAGCCTGGGGCCTCAGTGAAGGTTTCCTGCAAGG |
| | Nucleic Acid | CATCTGGATACACCTTCACCAGCTACTATATGCACTGGGTGCGACAGGCCCCTGGACAAGGGCTTGAGTG |
| | Sequence | GATGGGAATAATCAACCCTAGTGGTGGTAGCACAAGCTACGCACAGAAGTTCCAGGGCAGAGTCACCATG |
| | | ACCAGGGACACGTCCACGAGCACAGTCTACATGGAGCTGAGCAGCCTGAGATCTGAGGACACGGCGGTGT |
| | | ACTACTGCGCCAGAGACACGGGAGGATACGCCTTTGATATTTGGGGACAGGGTACATTGGTCACCGTCTC |
| | | CTCA |
| 155 | BIIB-9-1274_VH | QVQLVQSGAEVKKPGASVKVSCKASGYTFTSYYMHWVRQAPGQGLEWMGIINPSGGSTSYAQKFQGRVTM |
| | Amino Acid | TRDTSTSTVYMELSSLRSEDTAVYYCARDTGGYAFDIWGQGTLVTVSS |
| | Sequence | |
| 156 | BIIB-9-1274_VH | CAGGTGCAGCTGGTGCAGTCTGGGGCTGAGGTGAAGAAGCCTGGGGCCTCAGTGAAGGTTTCCTGCAAGG |
| | Nucleic Acid | CATCTGGATACACCTTCACCAGCTACTATATGCACTGGGTGCGACAGGCCCCTGGACAAGGGCTTGAGTG |
| | Sequence | GATGGGAATAATCAACCCTAGTGGTGGTAGCACAAGCTACGCACAGAAGTTCCAGGGCAGAGTCACCATG |
| | | ACCAGGGACACGTCCACGAGCACAGTCTACATGGAGCTGAGCAGCCTGAGATCTGAGGACACGGCGGTGT |
| | | ACTACTGCGCCAGAGACACGGGAGGATACGCCTTTGATATTTGGGGACAGGGTACATTGGTCACCGTCTC |
| | | CTCA |
| 157 | BIIB-9-1275_VH | QLQLQESGPGLVKPSETLSLTCTVSGGSISSSSYYWGWIRQPPGKGLEWIGSIYYSGSTYYNPSLKSRVT |
| | Amino Acid | ISVDTSKNQFSLKLSSVTAADTAVYYCARDVGRTYELFDIWGQGTMVTVSS |
| | Sequence | |
| 158 | BIIB-9-1275_VH | CAGCTGCAGCTGCAGGAGTCGGGCCCAGGACTGGTGAAGCCTTCGGAGACCCTGTCCCTCACCTGCACTG |
| | Nucleic Acid | TCTCTGGTGGCTCCATCAGCAGTAGTAGTTACTACTGGGGCTGGATCCGCCAGCCCCCAGGGAAGGGGCT |
| | Sequence | GGAGTGGATTGGGAGTATCTATTATAGTGGGAGCACCTACTACAACCCGTCCCTCAAGAGTCGAGTCACC |
| | | ATATCCGTAGACACGTCCAAGAACCAGTTCTCCCTGAAGCTGAGTTCTGTGACCGCCGCAGACACGGCGG |
| | | TGTACTACTGCGCCAGAGATGTAGGAAGAACCTACGAGCTATTCGACATATGGGGTCAGGGTACAATGGT |
| | | CACCGTCTCCTCA |
| 159 | BIIB-9-1276_VH | QLQLQESGPGLVKPSETLSLTCTVSGGSISSSSYYWGWIRQPPGKGLEWIGSIYYSGSTYYNPSLKSRVT |
| | Amino Acid | ISVDTSKNQFSLKLSSVTAADTAVYYCARDVGRTYELFDIWGQGTMVTVSS |
| | Sequence | |
| 160 | BIIB-9-1276_VH | CAGCTGCAGCTGCAGGAGTCGGGCCCAGGACTGGTGAAGCCTTCGGAGACCCTGTCCCTCACCTGCACTG |
| | Nucleic Acid | TCTCTGGTGGCTCCATCAGCAGTAGTAGTTACTACTGGGGCTGGATCCGCCAGCCCCCAGGGAAGGGGCT |
| | Sequence | GGAGTGGATTGGGAGTATCTATTATAGTGGGAGCACCTACTACAACCCGTCCCTCAAGAGTCGAGTCACC |
| | | ATATCCGTAGACACGTCCAAGAACCAGTTCTCCCTGAAGCTGAGTTCTGTGACCGCCGCAGACACGGCGG |
| | | TGTACTACTGCGCCAGAGATGTAGGAAGAACCTACGAGCTATTCGACATATGGGGTCAGGGTACAATGGT |
| | | CACCGTCTCCTCA |
| 161 | BIIB-9-1277_VH | QVQLVQSGAEVKKPGASVKVSCKASGYTFTSYYMHWVRQAPGQGLEWMGIINPSGGSTSYAQKFQGRVTM |
| | Amino Acid | TRDTSTSTVYMELSSLRSEDTAVYYCARGGTGYYYGSGSRDGYHYYYGMDVWGQGTTVTVSS |
| | Sequence | |
| 162 | BIIB-9-1277_VH | CAGGTGCAGCTGGTGCAGTCTGGGGCTGAGGTGAAGAAGCCTGGGGCCTCAGTGAAGGTTTCCTGCAAGG |
| | Nucleic Acid | CATCTGGATACACCTTCACCAGCTACTATATGCACTGGGTGCGACAGGCCCCTGGACAAGGGCTTGAGTG |
| | Sequence | GATGGGAATAATCAACCCTAGTGGTGGTAGCACAAGCTACGCACAGAAGTTCCAGGGCAGAGTCACCATG |
| | | ACCAGGGACACGTCCACGAGCACAGTCTACATGGAGCTGAGCAGCCTGAGATCTGAGGACACGGCGGTGT |
| | | ACTACTGCGCCAGAGGTGGAACTGGGTACTACTACGGAAGCGGAAGCAGAGACGGCTACCACTATTACTA |
| | | CGGCATGGACGTATGGGGCCAGGGAACAACTGTCACCGTCTCCTCA |
| 163 | BIIB-9-1278_VH | QVQLVQSGAEVKKPGASVKVSCKASGYTFTSYYMVWVRQAPGQGLEWMGIINPSGGSTSYAQKFQGRVTM |
| | Amino Acid | TRDTSTSTVYMELSSLRSEDTAVYYCARGPGELGYYLAFDIWGQGTMVTVSS |
| | Sequence | |
| 164 | BIIB-9-1278_VH | CAGGTGCAGCTGGTGCAGTCTGGGGCTGAGGTGAAGAAGCCTGGGGCCTCAGTGAAGGTTTCCTGCAAGG |
| | Nucleic Acid | CATCTGGATACACCTTCACCAGCTACTATATGGTCTGGGTGCGACAGGCCCCTGGACAAGGGCTTGAGTG |
| | Sequence | GATGGGAATAATCAACCCTAGTGGTGGTAGCACAAGCTACGCACAGAAGTTCCAGGGCAGAGTCACCATG |
| | | ACCAGGGACACGTCCACGAGCACAGTCTACATGGAGCTGAGCAGCCTGAGATCTGAGGACACGGCGGTGT |
| | | ACTACTGCGCCAGAGGACCTGGAGAATTGGGATATTATTTAGCCTTCGATATCTGGGGTCAGGGTACAAT |
| | | GGTCACCGTCTCCTCA |
| 165 | BIIB-9-1279_VH | QVQLVQSGAEVKKPGASVKVSCKASGYTFTSYYMHWVRQAPGQGLEWMGIINPSGGSTSYAQKFQGRVTM |
| | Amino Acid | TRDTSTSTVYMELSSLRSEDTAVYYCARGPTDSSGYLDMDVWGKGTTVTVSS |
| | Sequence | |
| 166 | BIIB-9-1279_VH | CAGGTGCAGCTGGTGCAGTCTGGGGCTGAGGTGAAGAAGCCTGGGGCCTCAGTGAAGGTTTCCTGCAAGG |
| | Nucleic Acid | CATCTGGATACACCTTCACCAGCTACTATATGCACTGGGTGCGACAGGCCCCTGGACAAGGGCTTGAGTG |
| | Sequence | GATGGGAATAATCAACCCTAGTGGTGGTAGCACAAGCTACGCACAGAAGTTCCAGGGCAGAGTCACCATG |
| | | ACCAGGGACACGTCCACGAGCACAGTCTACATGGAGCTGAGCAGCCTGAGATCTGAGGACACGGCGGTGT |
| | | ACTACTGCGCCAGAGGACCCACTGACAGCAGCGGATACTTGGACATGGACGTATGGGGCAAGGGTACAAC |
| | | TGTCACCGTCTCCTCA |
| 167 | BIIB-9-1280_VH | QVQLVQSGAEVKKPGASVKVSCKASGYTFTSYYMVWVRQAPGQGLEWMGIINPSGGSTSYAQKFQGRVTM |
| | Amino Acid | TRDTSTSTVYMELSSLRSEDTAVYYCARGPWYSYYYMDVWGKGTTVTVSS |
| | Sequence | |
| 168 | BIIB-9-1280_VH | CAGGTGCAGCTGGTGCAGTCTGGGGCTGAGGTGAAGAAGCCTGGGGCCTCAGTGAAGGTTTCCTGCAAGG |
| | Nucleic Acid | CATCTGGATACACCTTCACCAGCTACTATATGGTCTGGGTGCGACAGGCCCCTGGACAAGGGCTTGAGTG |
| | Sequence | GATGGGAATAATCAACCCTAGTGGTGGTAGCACAAGCTACGCACAGAAGTTCCAGGGCAGAGTCACCATG |
| | | ACCAGGGACACGTCCACGAGCACAGTCTACATGGAGCTGAGCAGCCTGAGATCTGAGGACACGGCGGTGT |
| | | ACTACTGCGCCAGAGGGCCTTGGTACAGTTATTACTACATGGACGTATGGGGCAAGGGTACAACTGTCAC |
| | | CGTCTCCTCA |
| 169 | BIIB-9-1281_VH | QVQLQQWGAGLLKPSETLSLTCAVYGGSFSGYYWSWIRQPPGKGLEWIGEIDHSGSTNYNPSLKSRVTIS |
| | Amino Acid | VDTSKNQFSLKLSSVTAADTAVYYCARTTRSKYYGMDVWGQGTMVTVSS |
| | Sequence | |
| 170 | BIIB-9-1281_VH | CAAGTACAATTACAACAGTGGGGAGCTGGTTTATTAAAGCCTTCAGAAACTTTAAGTTTGACCTGTGCTG |
| | Nucleic Acid | TTTACGGTGGATCATTTTCTGGTTATTACTGGAGTTGGATTCGTCAACCACCAGGCAAAGGATTGGAGTG |
| | Sequence | GATCGGTGAGATAGACCATTCAGGCTCCACTAACTACAATCCAAGTTTAAAATCCAGGGTTACTATCTCC |
| | | GTAGACACGTCCAAGAACCAGTTCTCCCTGAAGCTGAGTTCTGTGACCGCCGCAGACACGGCGGTGTACT |
| | | ACTGCGCCAGAACTACAAGATCCAAATACTACGGCATGGATGTATGGGGCCAGGGTACAATGGTCACCGT |
| | | CTCCTCA |
| 171 | BIIB-9-1282_VH | QVQLVQSGAEVKKPGASVKVSCKASGYTFTSYYMVWVRQAPGQGLEWMGIINPSGGSTSYAQKFQGRVTM |
| | Amino Acid | TRDTSTSTVYMELSSLRSEDTAVYYCARVPTYRYSYLAFDIWGQGTMVTVSS |
| | Sequence | |
| 172 | BIIB-9-1282_VH | CAGGTGCAGCTGGTGCAGTCTGGGGCTGAGGTGAAGAAGCCTGGGGCCTCAGTGAAGGTTTCCTGCAAGG |
| | Nucleic Acid | CATCTGGATACACCTTCACCAGCTACTATATGGTCTGGGTGCGACAGGCCCCTGGACAAGGGCTTGAGTG |
| | Sequence | GATGGGAATAATCAACCCTAGTGGTGGTAGCACAAGCTACGCACAGAAGTTCCAGGGCAGAGTCACCATG |
| | | ACCAGGGACACGTCCACGAGCACAGTCTACATGGAGCTGAGCAGCCTGAGATCTGAGGACACGGCGGTGT |
| | | ACTACTGCGCCAGAGTCCCTACATACAGATACAGCTACTTAGCCTTCGATATCTGGGGTCAGGGTACAAT |
| | | GGTCACCGTCTCCTCA |
| 173 | BIIB-9-1283_VH | QVQLVQSGAEVKKPGASVKVSCKASGYTFTSYYMVWVRQAPGQGLEWMGIINPSGGSTSYAQKFQGRVTM |
| | Amino Acid | TRDTSTSTVYMELSSLRSEDTAVYYCARVPTYRYSYLAFDIWGQGTMVTVSS |
| | Sequence | |
| 174 | BIIB-9-1283_VH | CAGGTGCAGCTGGTGCAGTCTGGGGCTGAGGTGAAGAAGCCTGGGGCCTCAGTGAAGGTTTCCTGCAAGG |
| | Nucleic Acid | CATCTGGATACACCTTCACCAGCTACTATATGGTCTGGGTGCGACAGGCCCCTGGACAAGGGCTTGAGTG |
| | Sequence | GATGGGAATAATCAACCCTAGTGGTGGTAGCACAAGCTACGCACAGAAGTTCCAGGGCAGAGTCACCATG |
| | | ACCAGGGACACGTCCACGAGCACAGTCTACATGGAGCTGAGCAGCCTGAGATCTGAGGACACGGCGGTGT |
| | | ACTACTGCGCCAGAGTCCCTACATACAGATACAGCTACTTAGCCTTCGATATCTGGGGTCAGGGTACAAT |
| | | GGTCACCGTCTCCTCA |
| 175 | BIIB-9-1284_VH | QVQLVQSGAEVKKPGASVKVSCKASGYTFTSYYMVWVRQAPGQGLEWMGIINPSGGSTSYAQKFQGRVTM |
| | Amino Acid | TRDTSTSTVYMELSSLRSEDTAVYYCARVPTYRYSYLAFDIWGQGTMVTVSS |
| | Sequence | |
| 176 | BIIB-9-1284_VH | CAGGTGCAGCTGGTGCAGTCTGGGGCTGAGGTGAAGAAGCCTGGGGCCTCAGTGAAGGTTTCCTGCAAGG |
| | Nucleic Acid | CATCAGGATACACCTTCACCAGCTACTATATGGTCTGGGTGCGACAGGCCCCTGGACAAGGGCTTGAGTG |
| | Sequence | GATGGGAATAATCAACCCTAGTGGTGGTAGCACAAGCTACGCACAGAAGTTCCAGGGCAGAGTCACCATG |
| | | ACCAGGGACACGTCCACGAGCACAGTCTACATGGAGCTGAGCAGCCTGAGATCTGAGGACACGGCGGTGT |
| | | ACTACTGCGCCAGAGTCCCTACATACAGATACAGCTACTTAGCCTTCGATATCTGGGGTCAGGGTACAAT |
| | | GGTCACCGTCTCCTCA |
| 177 | BIIB-9-1285_VH | QVQLVQSGAEVKKPGASVKVSCKASGYTFTSYYMVWVRQAPGQGLEWMGIINPSGGSTSYAQKFQGRVTM |
| | Amino Acid | TRDTSTSTVYMELSSLRSEDTAVYYCARVPTYRYSYLAFDIWGQGTMVTVSS |
| | Sequence | |
| 178 | BIIB-9-1285_VH | CAGGTGCAGCTGGTGCAGTCTGGGGCTGAGGTGAAGAAGCCTGGGGCCTCAGTGAAGGTTTCCTGCAAGG |
| | Nucleic Acid | CATCTGGATACACCTTCACCAGCTACTATATGGTCTGGGTGCGACAGGCCCCTGGACAAGGGCTTGAGTG |
| | Sequence | GATGGGAATAATCAACCCTAGTGGTGGTAGCACAAGCTACGCACAGAAGTTCCAGGGCAGAGTCACCATG |
| | | ACCAGGGACACGTCCACGAGCACAGTCTACATGGAGCTGAGCAGCCTGAGATCTGAGGACACGGCGGTGT |
| | | ACTACTGCGCCAGAGTCCCTACATACAGATACAGCTACTTAGCCTTCGATATCTGGGGTCAGGGTACAAT |
| | | GGTCACCGTCTCCTCA |
| 179 | BIIB-9-1286_VH | KPGASVKVSCKASGYTFTSYYMVWVRQAPGQGLEWMGIINPSGGSTSYAQKFQGRVTMTRDTSTSTVYME |
| | Amino Acid | LSSLRSEDTAVYYCARVPTYRYSYLAFDIWGQGTMVTVSS |
| | Sequence | |
| 180 | BIIB-9-1286_VH | CAGGTGCAGCTGGTGCAGTCTGGGGCTGAGGTGAAGAAGCCTGGGGCCTCAGTGAAGGTTTCCTGCAAGG |
| | Nucleic Acid | CATCTGGATACACCTTCACCAGCTACTATATGGTCTGGGTGCGACAGGCCCCTGGACAAGGGCTTGAGTG |
| | Sequence | GATGGGAATAATCAACCCTAGTGGTGGTAGCACAAGCTACGCACAGAAGTTCCAGGGCAGAGTCACCATG |
| | | ACCAGGGACACGTCCACGAGCACAGTCTACATGGAGCTGAGCAGCCTGAGATCTGAGGACACGGCGGTGT |
| | | ACTACTGCGCCAGAGTCCCTACATACAGATACAGCTACTTAGCCTTCGATATCTGGGGTCAGGGTACAAT |
| | | GGTCACCGTCTCCTCA |
| 181 | BIIB-9-1287_VH | QLQLQESGPGLVKPSETLSLTCTVSGGSISSSDYYWGWIRQPPGKGLEWIGSIYYSGSTYYNPSLKSRVT |
| | Amino Acid | ISVDTSKNQFSLKLSSVTAADTAVYYCARSPRHKVRGPNWFDPWGQGTLVTVSS |
| | Sequence | |
| 182 | BIIB-9-1287_VH | CAGCTGCAGCTGCAGGAGTCGGGCCCAGGACTGGTGAAGCCTTCGGAGACCCTGTCCCTCACCTGCACTG |
| | Nucleic Acid | TCTCTGGTGGCTCCATCAGCAGTAGTGACTACTACTGGGGCTGGATCCGCCAGCCCCCAGGGAAGGGGCT |
| | Sequence | GGAGTGGATTGGGAGTATCTATTATAGTGGGAGCACCTACTACAACCCGTCCCTCAAGAGTCGAGTCACC |
| | | ATATCCGTAGACACGTCCAAGAACCAGTTCTCCCTGAAGCTGAGTTCTGTGACCGCCGCAGACACGGCGG |
| | | TGTACTACTGCGCCAGATCACCTAGGCACAAAGTGCGTGGCCCCAATTGGTTTGATCCATGGGGACAGGG |
| | | TACATTGGTCACCGTCTCCTCA |

Class IV Antibodies - VH Sequences

| | | |
|---|---|---|
| 183 | BIIB-9-397_VH | QVQLQESGPGLVKPSETLSLTCAVSGYSISSGYYWAWIRQPPGKGLEWIGSIYHSGSTYYNPSLKSRVTI |
| | Amino Acid | SVDTSKNQFSLKLSSVTAADTAVYYCARDVWYVGGFDPWGQGTLVTVSS |
| | Sequence | |
| 184 | BIIB-9-397_VH | CAGGTGCAGCTGCAGGAGTCGGGCCCAGGACTGGTGAAGCCTTCGGAGACCCTGTCCCTCACCTGCGCTG |
| | Nucleic Acid | TCTCTGGTTACTCCATCAGCAGTGGTTACTACTGGGCTTGGATCCGGCAGCCCCCAGGGAAGGGGCTGGA |
| | Sequence | GTGGATTGGGAGTATCTATCATAGTGGGAGCACCTACTACAACCCGTCCCTCAAGAGTCGAGTCACCATA |
| | | TCAGTAGACACGTCCAAGAACCAGTTCTCCCTGAAGCTGAGTTCTGTGACCGCCGCAGACACGGCGGTGT |
| | | ACTACTGCGCCAGAGATGTGTGGTACGTCGGCGGTTTCGATCCCTGGGGACAGGGTACATTGGTCACCGT |
| | | CTCCTCA |
| 185 | BIIB-9-578_VH | QVQLQESGPGLVKPSETLSLTCTVSGGSISSSSYYWGWIRQPPGKGLEWIGSISYSGSTYYNPSLKSRVT |
| | Amino Acid | IVDTSKNSQFSLKLSSVTAADTAVYYCARDKYQDYSFDIWGQGTMVTVSS |
| | Sequence | |
| 186 | BIIB-9-578_VH | CAGCTGCAGCTGCAGGAGTCGGGCCCAGGACTGGTGAAGCCTTCGGAGACCCTGTCCCTCACCTGCACTG |
| | Nucleic Acid | TCTCTGGTGGCTCCATCAGCAGTAGTAGTTACTACTGGGGCTGGATCCGCCAGCCCCCAGGGAAGGGGCT |
| | Sequence | GGAGTGGATTGGGAGTATCTCCTATAGTGGGAGCACCTACTACAACCCGTCCCTCAAGAGTCGAGTCACC |
| | | ATATCCGTAGACACGTCCAAGAACCAGTTCTCCCTGAAGCTGAGTTCTGTGACCGCCGCAGACACGGCGG |
| | | TGTACTACTGCGCTAGAGATAAGTACCAAGACTATTCATTCGACATATGGGGTCAGGGTACAATGGTCAC |
| | | CGTCTCCTCA |
| 187 | BIIB-9-631_VH | QVQLVQSGAEVKKPGASVKVSCKASGYTFTSYYMHWVRQAPGQGLEWMGIINPSGGSTSYAQKFQGRVTM |
| | Amino Acid | TRDTSTSTVYMELSSLRSEDTAVYYCARAENRGDYEAWGQGTLVTVSS |
| | Sequence | |
| 188 | BIIB-9-631_VH | CAGGTGCAGCTGGTGCAGTCTGGGGCTGAGGTGAAGAAGCCTGGGGCCTCAGTGAAGGTTTCCTGCAAGG |
| | Nucleic Acid | CATCTGGATACACCTTCACCAGCTACTATATGCACTGGGTGCGACAGGCCCCTGGACAAGGGCTTGAGTG |
| | Sequence | GATGGGAATAATCAACCCTAGTGGTGGTAGCACAAGCTACGCACAGAAGTTCCAGGGCAGAGTCACCATG |
| | | ACCAGGGACACGTCCACGAGCACAGTCTACATGGAGCTGAGCAGCCTGAGATCTGAGGACACGGCGGTGT |
| | | ACTACTGCGCCAGAGCCGAGAACAGAGGAGACTACGAGGCATGGGGACAGGGTACATTGGTCACCGTCTC |
| | | CTCA |
| 189 | BIIB-9-612_VH | QVQLVQSGAEVKKPGASVKVSCKASGYTFTSYYMHWVRQAPGQGLEWMGIINPSGGSTSYAQKFQGRVTM |
| | Amino Acid | TRDTSTSTVYMELSSLRSEDTAVYYCARDAGYHWYGMDVWGQGTTVTVSS |
| | Sequence | |
| 190 | BIIB-9-612_VH | CAGGTGCAGCTGGTGCAGTCTGGGGCTGAGGTGAAGAAGCCTGGGGCCTCAGTGAAGGTTTCCTGCAAGG |
| | Nucleic Acid | CATCTGGATACACCTTCACCAGCTACTATATGCACTGGGTGCGACAGGCCCCTGGACAAGGGCTTGAGTG |
| | Sequence | GATGGGAATAATCAACCCTAGTGGTGGTAGCACAAGCTACGCACAGAAGTTCCAGGGCAGAGTCACCATG |
| | | ACCAGGGACACGTCCACGAGCACAGTCTACATGGAGCTGAGCAGCCTGAGATCTGAGGACACGGCGGTGT |
| | | ACTACTGCGCCAGAGACGCAGGATACCACTGGTACGGAATGGACGTATGGGGCCAGGGAACAACTGTCAC |
| | | CGTCTCCTCA |

Class I Antibodies - VL Sequences

| | | |
|---|---|---|
| 191 | BIIB-9-605_VL | DIQMTQSPSSVSASVGDRVTITCRASQGISSWLAWYQQKPGKAPKLLIYAASSLQSGVPSRFSGSGSGTD |
| | Amino Acid | FTLTISSLQPEDFATYYCQQADVFPFTFGGGTKVEIK |
| | Sequence | |
| 192 | BIIB-9-605_VL | GACATCCAGATGACCCAGTCTCCATCTTCCGTGTCTGCATCTGTAGGAGACAGAGTCACCATCACTTGTC |
| | Nucleic Acid | GGGCGAGTCAGGGTATTAGCAGCTGGTTAGCCTGGTATCAGCAGAAACCAGGGAAAGCCCCTAAGCTCCT |
| | Sequence | GATCTATGCTGCATCCAGTTTGCAAAGTGGGGTCCCATCAAGGTTCAGCGGCAGTGGATCTGGGACAGAT |
| | | TTCACTCTCACCATCAGCAGCCTGCAGCCTGAAGATTTTGCAACTTATTACTGTCAGCAGGCAGACGTCT |
| | | TCCCTTTCACTTTTGGCGGAGGGACCAAGGTTGAGATCAAA |
| 193 | BIIB-9-475_VL | DIQMTQSPSSLSASVGDRVTITCQASQDITNYLNWYQQKPGKAPKLLIYDASNLETGVPSRFSGSGSGTD |
| | Amino Acid | FTFTISSLQPEDIATYYCQQSSNFPLTFGGGTKVEIK |
| | Sequence | |
| 194 | BIIB-9-475_VL | GACATCCAGATGACCCAGTCTCCATCCTCCCTGTCTGCATCTGTAGGAGACAGAGTCACCATCACTTGCC |
| | Nucleic Acid | AGGCGAGTCAGGACATTACCAACTATTTAAATTGGTATCAGCAGAAACCAGGGAAAGCCCCTAAGCTCCT |
| | Sequence | GATCTACGATGCATCCAATTTGGAAACAGGGGTCCCATCAAGGTTCAGTGGAAGTGGATCTGGGACAGAT |
| | | TTTACTTTCACCATCAGCAGCCTGCAGCCTGAAGATATTGCAACATATTACTGTCAGCAGTCCTCCAATT |
| | | TCCCTCTCACTTTTGGCGGAGGGACCAAGGTTGAGATCAAA |
| 195 | BIIB-9-477_VL | EIVMTQSPATLSVSPGERATLSCRASQSVSSSLAWYQQKPGQAPRLLIFGASTRATGIPARFSGSGSGTE |
| | Amino Acid | FTLTISSLQSEDFAVYYCQQDVNWPITFGGGTKVEIK |
| | Sequence | |
| 196 | BIIB-9-477_VL | GAAATAGTGATGACGCAGTCTCCAGCCACCCTGTCTGTGTCTCCAGGGGAAAGAGCCACCCTCTCCTGCA |
| | Nucleic Acid | GGGCCAGTCAGAGTGTTAGCAGCAGCTTAGCCTGGTACCAGCAGAAACCTGGCCAGGCTCCCAGGCTCCT |
| | Sequence | CATCTTTGGTGCATCCACCAGGGCCACTGGTATCCCAGCCAGGTTCAGTGGCAGTGGGTCTGGGACAGAG |
| | | TTCACTCTCACCATCAGCAGCCTGCAGTCTGAAGATTTTGCAGTTTATTACTGTCAGCAGGACGTCAATT |
| | | GGCCTATCACTTTTGGCGGAGGGACCAAGGTTGAGATCAAA |
| 197 | BIIB-9-479_VL | DIQMTQSPSTLSASVGDRVTITCRASQSISSWLAWYQQKPGKAPKLLIYKASSLESGVPSRFSGSGSGTE |
| | Amino Acid | FTLTISSLQPDDFATYYCQQYRILSPTFGGGTKVEIK |
| | Sequence | |
| 198 | BIIB-9-479_VL | GACATCCAGATGACCCAGTCTCCTTCCACCCTGTCTGCATCTGTAGGAGACAGAGTCACCATCACTTGCC |
| | Nucleic Acid | GGGCCAGTCAGAGTATTAGTAGCTGGTTGGCCTGGTATCAGCAGAAACCAGGGAAAGCCCCTAAGCTCCT |
| | Sequence | GATCTATAAAGCCTCCAGTTTGGAAAGTGGGGTCCCATCAAGGTTCAGCGGCAGTGGATCTGGGACAGAA |
| | | TTCACTCTCACCATCAGCAGCCTGCAGCCTGATGATTTTGCAACTTATTACTGCCAGCAGTACCGCATCC |
| | | TCTCTCCTACTTTTGGCGGAGGGACCAAGGTTGAGATCAAA |
| 199 | BIIB-9-480_VL | DIVMTQSPLSLPVTPGEPASISCRSSQSLLYSNGYNYLDWYLQKPGQSPQLLIYLGSNRASGVPDRFSGS |
| | Amino Acid | GSGTDFTLKISRVEAEDVGVYYCMQARQPPWTFGGGTKVE1K |
| | Sequence | |
| 200 | BIIB-9-480_VL | GATATTGTGATGACTCAGTCTCCACTCTCCCTGCCCGTCACCCCTGGAGAGCCGGCCTCCATCTCCTGCA |
| | Nucleic Acid | GGTCTAGTCAGAGCCTCCTGTATAGTAATGGATACAACTATTTGGATTGGTACCTGCAGAAGCCAGGGCA |
| | Sequence | GTCTCCACAGCTCCTGATCTATTTGGGTTCTAATCGGGCCTCCGGGGTCCCTGACAGGTTCAGTGGCAGT |
| | | GGATCAGGCACAGATTTTACACTGAAAATCAGCAGAGTGGAGGCTGAGGATGTTGGGGTTTATTACTGCA |
| | | TGCAGGCACGACAGCCCCCTTGGACTTTTGGCGGAGGGACCAAGGTTGAGATCAAA |
| 201 | BIIB-9-558_VL | DIQMTQSPSTLSASVGDRVTITCRASQSIGSWLAWYQQKPGKAPKLLIYKASSLESGVPSRFSGSGSGTE |
| | Amino Acid | FTLTISSLQPDDFATYYCQQAGSYSFTFGGGTKVEIK |
| | Sequence | |
| 202 | BIIB-9-558_VL | GACATCCAGATGACCCAGTCTCCTTCCACCCTGTCTGCATCTGTAGGAGACAGAGTCACCATCACTTGCC |
| | Nucleic Acid | GGGCCAGTCAGAGTATTGGTAGCTGGTTGGCCTGGTATCAGCAGAAACCAGGGAAAGCCCCTAAGCTCCT |
| | Sequence | GATCTATAAAGCCTCCAGTTTGGAAAGTGGGGTCCCATCAAGGTTCAGCGGCAGTGGATCTGGGACAGAA |
| | | TTCACTCTCACCATCAGCAGCCTGCAGCCTGATGATTTTGCAACTTATTACTGCCAGCAGGCCGGAAGCT |
| | | ACTCTTTCACTTTTGGCGGAGGGACCAAGGTTGAGATCAAA |
| 203 | BIIB-9-414_VL | DIQMTQSPSSVSASVGDRVTITCRASQGISSWLAWYQQKPGKAPKLLIYAASSLQSGVPSRFSGSGSGTD |
| | Amino Acid | FTLTISSLQPEDFATYYCQQGDVFPFTFGGGTKVEIK |
| | Sequence | |
| 204 | BIIB-9-414_VL | GACATCCAGATGACCCAGTCTCCATCTTCCGTGTCTGCATCTGTAGGAGACAGAGTCACCATCACTTGTC |
| | Nucleic Acid | GGGCGAGTCAGGGTATTAGCAGCTGGTTAGCCTGGTATCAGCAGAAACCAGGGAAAGCCCCTAAGCTCCT |
| | Sequence | GATCTATGCTGCATCCAGTTTGCAAAGTGGGGTCCCATCAAGGTTCAGCGGCAGTGGATCTGGGACAGAT |
| | | TTCACTCTCACCATCAGCAGCCTGCAGCCTGAAGATTTTGCAACTTATTACTGTCAGCAGGGAGACGTCT |
| | | TCCCTTTCACTTTTGGCGGAGGGACCAAGGTTGAGATCAAA |
| 205 | BIIB-9-415_VL | DIQMTQSPSSVSASVGDRVTITCRASQGIDSWLAWYQQKPGKAPKLLIYAASSLQSGVPSRFSGSGSGTD |
| | Amino Acid | FTLTISSLQPEDFATYYCQQGDAFPFTFGGGTKVEIK |
| | Sequence | |
| 206 | BIIB-9-415_VL | GACATCCAGATGACCCAGTCTCCATCTTCCGTGTCTGCATCTGTAGGAGACAGAGTCACCATCACTTGTC |
| | Nucleic Acid | GGGCGAGTCAGGGTATTGACAGCTGGTTAGCCTGGTATCAGCAGAAACCAGGGAAAGCCCCTAAGCTCCT |
| | Sequence | GATCTATGCTGCATCCAGTTTGCAAAGTGGGGTCCCATCAAGGTTCAGCGGCAGTGGATCTGGGACAGAT |
| | | TTCACTCTCACCATCAGCAGCCTGCAGCCTGAAGATTTTGCAACTTATTACTGTCAGCAGGGAGACGCCT |
| | | TCCCTTTCACTTTTGGCGGAGGGACCAAGGTTGAGATCAAA |
| 207 | BIIB-9-425_VL | EIVLTQSPGTLSLSPGERATLSCRASQSVSSDYLAWYQQKPGQAPRLLIYGASSRATGIPDRFSGSGSGT |
| | Amino Acid | DFTLTISRLEPEDFAVYYCQQYDSHPYTFGGGTKVEIK |
| | Sequence | |
| 208 | BIIB-9-425_VL | GAAATTGTGTTGACGCAGTCTCCAGGCACCCTGTCTTTGTCTCCAGGGGAAAGAGCCACCCTCTCCTGCA |
| | Nucleic Acid | GGGCCAGTCAGAGTGTTAGCAGCGACTACTTAGCCTGGTACCAGCAGAAACCTGGCCAGGCTCCCAGGCT |
| | Sequence | CCTCATCTATGGTGCATCCAGCAGGGCCACTGGCATCCCAGACAGGTTCAGTGGCAGTGGGTCTGGGACA |
| | | GACTTCACTCTCACCATCAGCAGACTGGAGCCTGAAGATTTTGCAGTGTATTACTGTCAGCAGTACGACA |
| | | GTCACCCTTACACTTTTGGCGGAGGGACCAAGGTTGAGATCAAA |
| 209 | BIIB-9-440_VL | DIVMTQSPDSLAVSLGERATINCKSSQSVLYSSNNKNYLAWYQQKPGQPPKLLIYWASTRESGVPDRFSG |
| | Amino Acid | SGSGTDFTLTISSLQAEDVAVYYCQQYALDPPTFGGGTKVEIK |
| | Sequence | |
| 210 | BIIB-9-440_VL | GACATCGTGATGACCCAGTCTCCAGACTCCCTGGCTGTGTCTCTGGGCGAGAGGGCCACCATCAACTGCA |
| | Nucleic Acid | AGTCCAGCCAGAGTGTTTTATACAGCTCCAACAATAAGAACTACTTAGCTTGGTACCAGCAGAAACCAGG |
| | Sequence | ACAGCCTCCTAAGCTGCTCATTTACTGGGCATCTACCCGGGAATCCGGGGTCCCTGACCGATTCAGTGGC |
| | | AGCGGGTCTGGGACAGATTTCACTCTCACCATCAGCAGCCTGCAGGCTGAAGATGTGGCAGTTTATTACT |
| | | GTCAGCAGTACGCCCTCGACCCTCCTACTTTTGGCGGAGGGACCAAGGTTGAGATCAAA |
| 211 | BIIB-9-452_VL | EIVMTQSPATLSVSPGERATLSCRASQSVSSNLAWYQQKPGQAPRLLIYGASTRATGIPARFSGSGSGTE |
| | Amino Acid | FTLTISSLQSEDFAVYYCQQANNFPFTFGGGTKVEIK |
| | Sequence | |
| 212 | BIIB-9-452_VL | GAAATAGTGATGACGCAGTCTCCAGCCACCCTGTCTGTGTCTCCAGGGGAAAGAGCCACCCTCTCCTGCA |
| | Nucleic Acid | GGGCCAGTCAGAGTGTTAGCAGCAACTTAGCCTGGTACCAGCAGAAACCTGGCCAGGCTCCCAGGCTCCT |
| | Sequence | CATCTATGGTGCATCCACCAGGGCCACTGGTATCCCAGCCAGGTTCAGTGGCAGTGGGTCTGGGACAGAG |
| | | TTCACTCTCACCATCAGCAGCCTGCAGTCTGAAGATTTTGCAGTTTATTACTGTCAGCAGGCCAATAATT |
| | | TCCCTTTCACTTTTGGCGGAGGGACCAAGGTTGAGATCAAA |
| 213 | BIIB-9-460_VL | EIVMTQSPATLSVSPGERATLSCRASQSVSSNLAWYQQKPGQAPRLLIYGASTRATGIPARFSGSGSGTE |
| | Amino Acid | FTLTISSLQSEDFAVYYCQQHDNFPFTFGGGTKVEIK |
| | Sequence | |
| 214 | BIIB-9-460_VL | GAAATAGTGATGACGCAGTCTCCAGCCACCCTGTCTGTGTCTCCAGGGGAAAGAGCCACCCTCTCCTGCA |
| | Nucleic Acid | GGGCCAGTCAGAGTGTTAGCAGCAACTTAGCCTGGTACCAGCAGAAACCTGGCCAGGCTCCCAGGCTCCT |
| | Sequence | CATCTATGGTGCATCCACCAGGGCCACTGGTATCCCAGCCAGGTTCAGTGGCAGTGGGTCTGGGACAGAG |
| | | TTCACTCTCACCATCAGCAGCCTGCAGTCTGAAGATTTTGCAGTTTATTACTGTCAGCAGCACGACAATT |
| | | TCCCTTTCACTTTTGGCGGAGGGACCAAGGTTGAGATCAAA |
| 215 | BIIB-9-461_VL | EIVMTQSPATLSVSPGERATLSCRASQSVSSSLAWYQQKPGQAPRLLIYGASTRATGIPARFSGSGSGTE |
| | Amino Acid | FTLTISSLQSEDFAVYYCQQHHHWPPTFGGGTKVEIK |
| | Sequence | |
| 216 | BIIB-9-461_VL | GAAATAGTGATGACGCAGTCTCCAGCCACCCTGTCTGTGTCTCCAGGGGAAAGAGCCACCCTCTCCTGCA |
| | Nucleic Acid | GGGCCAGTCAGAGTGTTAGCAGCAGCTTAGCCTGGTACCAGCAGAAACCTGGCCAGGCTCCCAGGCTCCT |
| | Sequence | CATCTATGGTGCATCCACCAGGGCCACTGGTATCCCAGCCAGGTTCAGTGGCAGTGGGTCTGGGACAGAG |
| | | TTCACTCTCACCATCAGCAGCCTGCAGTCTGAAGATTTTGCAGTTTATTACTGTCAGCAGCACCACCACT |
| | | GGCCTCCTACTTTTGGCGGAGGGACCAAGGTTGAGATCAAA |
| 217 | BIIB-9-465_VL | DIQMTQSPSTLSASVGDRVTITCRASQSINSWLAWYQQKPGKAPKLLISDASSLESGVPSRFSGSGSGTE |
| | Amino Acid | FTLTISSLQPDDFATYYCQQYEIFPFTFGGGTKVEIK |
| | Sequence | |
| 218 | BIIB-9-465_VL | GACATCCAGATGACCCAGTCTCCTTCCACCCTGTCTGCATCTGTAGGAGACAGAGTCACCATCACTTGCC |
| | Nucleic Acid | GGGCCAGTCAGAGTATTAATAGCTGGTTGGCCTGGTATCAGCAGAAACCAGGGAAAGCCCCTAAGCTCCT |
| | Sequence | GATCTCCGATGCCTCCAGTTTGGAAAGTGGGGTCCCATCAAGGTTCAGCGGCAGTGGATCTGGGACAGAA |
| | | TTCACTCTCACCATCAGCAGCCTGCAGCCTGATGATTTTGCAACTTATTACTGCCAGCAGTACGAAATCT |
| | | TCCCTTTCACTTTTGGCGGAGGGACCAAGGTTGAGATCAAA |
| 219 | BIB-4-564_VL | DIQMTQSPSSLSASVGDRVTITCRASQSISSYLNWYQQKPGKAPKLLIYAASSLQSGVPSRFSGSGSGTD |
| | Amino Acid | FTLTISSLQPEDFATYYCQQSVAVPPTFGGGTKVEIK |
| | Sequence | |
| 220 | BIIB-9-564_VL | GACATCCAGATGACCCAGTCTCCATCCTCCCTGTCTGCATCTGTAGGAGACAGAGTCACCATCACTTGCC |
| | Nucleic Acid | GGGCAAGTCAGAGCATTAGCAGCTATTTAAATTGGTATCAGCAGAAACCAGGGAAAGCCCCTAAGCTCCT |
| | Sequence | GATCTATGCTGCATCCAGTTTGCAAAGTGGGGTCCCATCAAGGTTCAGTGGCAGTGGATCTGGGACAGAT |
| | | TTCACTCTCACCATCAGCAGTCTGCAACCTGAAGATTTTGCAACTTACTACTGTCAGCAAAGCGTCGCCG |
| | | TCCCTCCTACTTTTGGCGGAGGGACCAAGGTTGAGATCAAA |
| 221 | BIIB-9-484_VL | DIQMTQSPSSLSASVGDRVTITCQASQDIANYLNWYQQKPGKAPKLLIYDASNLETGVPSRFSGSGSGTD |
| | Amino Acid | FTFTISSLQPEDIATYYCQQYANFPYTFGGGTKVEIK |
| | Sequence | |
| 222 | BIIB-9-484_VL | GACATCCAGATGACCCAGTCTCCATCCTCCCTGTCTGCATCTGTAGGAGACAGAGTCACCATCACTTGCC |
| | Nucleic Acid | AGGCGAGTCAGGACATTGCCAACTATTTAAATTGGTATCAGCAGAAACCAGGGAAAGCCCCTAAGCTCCT |
| | Sequence | GATCTACGATGCATCCAATTTGGAAACAGGGGTCCCATCAAGGTTCAGTGGAAGTGGATCTGGGACAGAT |
| | | TTTACTTTCACCATCAGCAGCCTGCAGCCTGAAGATATTGCAACATATTACTGTCAGCAGTACGCCAACT |
| | | TCCCTTACACTTTTGGCGGAGGGACCAAGGTTGAGATCAAA |
| 223 | BIIB-9-469_VL | EIVMTQSPATLSVSPGERATLSCRASQSVSSNLAWYQQKPGQAPRLLIFGASTRATGIPARFSGSGSGTE |
| | Amino Acid | FTLTISSLQSEDFAVYYCQQSNNFPFTFGGGTKVEIK |
| | Sequence | |
| 224 | BIIB-9-469_VL | GAAATAGTGATGACGCAGTCTCCAGCCACCCTGTCTGTGTCTCCAGGGGAAAGAGCCACCCTCTCCTGCA |
| | Nucleic Acid | GGGCCAGTCAGAGTGTTAGCAGCAACTTAGCCTGGTACCAGCAGAAACCTGGCCAGGCTCCCAGGCTCCT |
| | Sequence | CATCTTTGGTGCATCCACCAGGGCCACTGGTATCCCAGCCAGGTTCAGTGGCAGTGGGTCTGGGACAGAG |
| | | TTCACTCTCACCATCAGCAGCCTGCAGTCTGAAGATTTTGCAGTTTATTACTGTCAGCAGTCCAATAATT |
| | | TCCCTTTCACTTTTGGCGGAGGGACCAAGGTTGAGATCAAA |
| 225 | BIIB-9-566_VL | EIVMTQSPATLSVSPGERATLSCRASQSVSSSLAWYQQKPGQAPRLLIYGASTRATGIPARFSGSGSGTE |
| | Amino Acid | FTLTISSLQSEDFAVYYCQQHDNWPPTFGGGTKVEIK |
| | Sequence | |
| 226 | BIIB-9-566_VL | GAAATAGTGATGACGCAGTCTCCAGCCACCCTGTCTGTGTCTCCAGGGGAAAGAGCCACCCTCTCCTGCA |
| | Nucleic Acid | GGGCCAGTCAGAGTGTTAGCAGCAGCTTAGCCTGGTACCAGCAGAAACCTGGCCAGGCTCCCAGGCTCCT |
| | Sequence | CATCTATGGTGCATCCACCAGGGCCACTGGTATCCCAGCCAGGTTCAGTGGCAGTGGGTCTGGGACAGAG |
| | | TTCACTCTCACCATCAGCAGCCTGCAGTCTGAAGATTTTGCAGTTTATTACTGTCAGCAGCACGACAATT |
| | | GGCCTCCTACTTTTGGCGGAGGGACCAAGGTTGAGATCAAA |
| 227 | BIIB-9-567_VL | DIQMTQSPSTLSASVGDRVTITCRASQSISSWLAWYQQKPGKAPKLLIYDASSLESGVPSRFSGSGSGTE |
| | Amino Acid | FTLTISSLQPDDFATYYCQQYRIYSPTFGGGTKVEIK |
| | Sequence | |
| 228 | BIIB-9-567_VL | GACATCCAGATGACCCAGTCTCCTTCCACCCTGTCTGCATCTGTAGGAGACAGAGTCACCATCACTTGCC |
| | Nucleic Acid | GGGCCAGTCAGAGTATTAGTAGCTGGTTGGCCTGGTATCAGCAGAAACCAGGGAAAGCCCCTAAGCTCCT |
| | Sequence | GATCTATGATGCCTCCAGTTTGGAAAGTGGGGTCCCATCAAGGTTCAGCGGCAGTGGATCTGGGACAGAA |
| | | TTCACTCTCACCATCAGCAGCCTGCAGCCTGATGATTTTGCAACTTATTACTGCCAGCAGTACAGAATCT |
| | | ACTCTCCTACTTTTGGCGGAGGGACCAAGGTTGAGATCAAA |
| 229 | BIIB-9-569_VL | DIQMTQSPSSLSASVGDRVTITCQASQDISNYLNWYQQKPGKAPKLLIYDASNLATGVPSRFSGSGSGTD |
| | Amino Acid | FTFTISSLQPEDIATYYCQQADDFPFTFGGGTKVEIK |
| | Sequence | |
| 230 | BIIB-9-569_VL | GACATCCAGATGACCCAGTCTCCATCCTCCCTGTCTGCATCTGTAGGAGACAGAGTCACCATCACTTGCC |
| | Nucleic Acid | AGGCGAGTCAGGACATTAGCAACTATTTAAATTGGTATCAGCAGAAACCAGGGAAAGCCCCTAAGCTCCT |
| | Sequence | GATCTACGATGCATCCAATTTGGCAACAGGGGTCCCATCAAGGTTCAGTGGAAGTGGATCTGGGACAGAT |
| | | TTTACTTTCACCATCAGCAGCCTGCAGCCTGAAGATATTGCAACATATTACTGTCAGCAGGCCGATGACT |
| | | TCCCTTTCACTTTTGGCGGAGGGACCAAGGTTGAGATCAAA |
| 231 | BIIB-9-588_VL | EIVMTQSPATLSVSPGERATLSCRASQSVSSNLAWYQQKPGQAPRLLIYGASTRATGIPARFSGSGSGTE |
| | Amino Acid | FTLTISSLQSEDFAVYYCQQAYNWPFTFGGGTKVEIK |
| | Sequence | |
| 232 | BIIB-9-588_VL | GAAATAGTGATGACGCAGTCTCCAGCCACCCTGTCTGTGTCTCCAGGGGAAAGAGCCACCCTCTCCTGCA |
| | Nucleic Acid | GGGCCAGTCAGAGTGTTAGCAGCAACTTAGCCTGGTACCAGCAGAAACCTGGCCAGGCTCCCAGGCTCCT |
| | Sequence | CATCTATGGTGCATCCACCAGGGCCACTGGTATCCCAGCCAGGTTCAGTGGCAGTGGGTCTGGGACAGAG |
| | | TTCACTCTCACCATCAGCAGCCTGCAGTCTGAAGATTTTGCAGTTTATTACTGTCAGCAGGCCTACAATT |
| | | GGCCTTTCACTTTTGGCGGAGGGACCAAGGTTGAGATCAAA |
| 233 | BIIB-9-611_VL | EIVMTQSPATLSVSPGERATLSCRASQSVSSNLAWYQQKPGQAPRLLIYGASTRATGIPARFSGSGSGTE |
| | Amino Acid | FTLTISSLQSEDFAVYYCQQDNIHPYTFGGGTKVEIK |
| | Sequence | |
| 234 | BIIB-9-611_VL | GAAATAGTGATGACGCAGTCTCCAGCCACCCTGTCTGTGTCTCCAGGGGAAAGAGCCACCCTCTCCTGCA |
| | Nucleic Acid | GGGCCAGTCAGAGTGTTAGCAGCAACTTAGCCTGGTACCAGCAGAAACCTGGCCAGGCTCCCAGGCTCCT |
| | Sequence | CATCTATGGTGCATCCACCAGGGCCACTGGTATCCCAGCCAGGTTCAGTGGCAGTGGGTCTGGGACAGAG |
| | | TTCACTCTCACCATCAGCAGCCTGCAGTCTGAAGATTTTGCAGTTTATTACTGTCAGCAGGACAATATCC |
| | | ACCCTTACACTTTTGGCGGAGGGACCAAGGTTGAGATCAAA |
| 235 | BIIB-9-619_VL | EIVLTQSPATLSLSPGERATLSCRASQSVSSYLAWYQQKPGQAPRLLIYDASNRATGIPARFSGSGSGTD |
| | Amino Acid | FTLTISSLEPEDFAVYYCQQRDNWPFTFGGGTKVEIK |
| | Sequence | |
| 236 | BIIB-9-619_VL | GAAATTGTGTTGACACAGTCTCCAGCCACCCTGTCTTTGTCTCCAGGGGAAAGAGCCACCCTCTCCTGCA |
| | Nucleic Acid | GGGCCAGTCAGAGTGTTAGCAGCTACTTAGCCTGGTACCAACAGAAACCTGGCCAGGCTCCCAGGCTCCT |
| | Sequence | CATCTATGATGCATCCAACAGGGCCACTGGCATCCCAGCCAGGTTCAGTGGCAGTGGGTCTGGGACAGAC |
| | | TTCACTCTCACCATCAGCAGCCTAGAGCCTGAAGATTTTGCAGTTTATTACTGTCAGCAGAGAGACAACT |
| | | GGCCTTTCACTTTTGGCGGAGGGACCAAGGTTGAGATCAAA |
| 237 | BIIB-9-626_VL | DIQMTQSPSTLSASVGDRVTITCRASQSISSWLAWYQQKPGKAPKLLIYKASSLESGVPSRFSGSGSGTE |
| | Amino Acid | FTLTISSLQPDDFATYYCQQDGSYPPLTFGGGTKVEIK |
| | Sequence | |
| 238 | BIIB-9-626_VL | GACATCCAGATGACCCAGTCTCCTTCCACCCTGTCTGCATCTGTAGGAGACAGAGTCACCATCACTTGCC |
| | Nucleic Acid | GGGCCAGTCAGAGTATTAGTAGCTGGTTGGCCTGGTATCAGCAGAAACCAGGGAAAGCCCCTAAGCTCCT |
| | Sequence | GATCTATAAAGCCTCCAGTTTGGAAAGTGGGGTCCCATCAAGGTTCAGCGGCAGTGGATCTGGGACAGAA |
| | | TTCACTCTCACCATCAGCAGCCTGCAGCCTGATGATTTTGCAACTTATTACTGCCAGCAGGACGGAAGTT |
| | | ACCCTCCTCTCACTTTTGGCGGAGGGACCAAGGTTGAGATCAAA |
| 239 | BIIB-9-883_VL | DIQMTQSPSSLSASVGDRVTITCQASQDITNYLNWYQQKPGKAPKLLIYDASNLETGVPSRFSGSGSGTD |
| | Amino Acid | FTFTISSLQPEDIATYYCQQADHFPFTFGGGTKVEIK |
| | Sequence | |
| 240 | BIIB-9-883_VL | GACATCCAGATGACCCAGTCTCCATCCTCCCTGTCTGCATCTGTAGGAGACAGAGTCACCATCACTTGCC |
| | Nucleic Acid | AGGCGAGTCAGGACATTACCAACTATTTAAATTGGTATCAGCAGAAACCAGGGAAAGCCCCTAAGCTCCT |
| | Sequence | GATCTACGATGCATCCAATTTGGAAACAGGGGTCCCATCAAGGTTCAGTGGAAGTGGATCTGGGACAGAT |
| | | TTTACTTTCACCATCAGCAGCCTGCAGCCTGAAGATATTGCAACATATTACTGTCAGCAGGCCGATCACT |
| | | TCCCTTTCACTTTTGGCGGAGGGACCAAGGTTGAGATCAAA |
| 241 | BIIB-9-419_VL | EIVMTQSPATLSLSPGERATLSCRASQSVSSYLAWYQQKPGQAPRLLIYDSSNRATGIPARFSGSGSGTD |
| | Amino Acid | FTLTISSLEPEDFAVYYCQQVSTHPYTFGGGTKVEIK |
| | Sequence | |
| 242 | BIIB-9-419_VL | GAAATTGTGATGACACAGTCTCCAGCCACCCTGTCTTTGTCTCCAGGGGAAAGAGCCACCCTCTCCTGCA |
| | Nucleic Acid | GGGCCAGTCAGAGTGTTAGCAGCTACTTAGCCTGGTACCAACAGAAACCTGGCCAGGCTCCCAGGCTCCT |
| | Sequence | CATCTATGATTCATCCAACAGGGCCACTGGCATCCCAGCCAGGTTCAGTGGCAGTGGGTCTGGGACAGAC |
| | | TTCACTCTCACCATCAGCAGCCTAGAGCCTGAAGATTTTGCAGTTTATTACTGTCAGCAGGTCAGTACCC |
| | | ACCCTTACACTTTTGGCGGAGGGACCAAGGTTGAGATCAAA |
| 243 | BIIB-9-451_VL | DIVMTQSPDSLAVSLGERATINCKSSQSVLYSSNNKNYLAWYQQKPGQPPKLLIYWASTRESGVPDRFSG |
| | Amino Acid | SGSGTDFTLTISSLQAEDVAVYYCQQYYFPPWTFGGGTKVEIK |
| | Sequence | |
| 244 | BIIB-9-451_VL | GACATCGTGATGACCCAGTCTCCAGACTCCCTGGCTGTGTCTCTGGGCGAGAGGGCCACCATCAACTGCA |
| | Nucleic Acid | AGTCCAGCCAGAGTGTTTTATACAGCTCCAACAATAAGAACTACTTAGCTTGGTACCAGCAGAAACCAGG |
| | Sequence | ACAGCCTCCTAAGCTGCTCATTTACTGGGCATCTACCCGGGAATCCGGGGTCCCTGACCGATTCAGTGGC |
| | | AGCGGGTCTGGGACAGATTTCACTCTCACCATCAGCAGCCTGCAGGCTGAAGATGTGGCAGTTTATTACT |
| | | GTCAGCAGTACTACTTCCCCCCTTGGACTTTTGGCGGAGGGACCAAGGTTGAGATCAAA |
| 245 | BIIB-9-473_VL | EIVLTQSPATLSLSPGERATLSCRASQSVSSYLAWYQQKPGQAPRLLIYDASNRATGIPARFSGSGSGTD |
| | Amino Acid | FTLTISSLEPEDFAVYYCQQRSFLPYTFGGGTKVEIK |
| | Sequence | |
| 246 | BIIB-9-473_VL | GAAATTGTGTTGACACAGTCTCCAGCCACCCTGTCTTTGTCTCCAGGGGAAAGAGCCACCCTCTCCTGCA |
| | Nucleic Acid | GGGCCAGTCAGAGTGTTAGCAGCTACTTAGCCTGGTACCAACAGAAACCTGGCCAGGCTCCCAGGCTCCT |
| | Sequence | CATCTATGATGCATCCAACAGGGCCACTGGCATCCCAGCCAGGTTCAGTGGCAGTGGGTCTGGGACAGAC |
| | | TTCACTCTCACCATCAGCAGCCTAGAGCCTGAAGATTTTGCAGTTTATTACTGTCAGCAGAGAAGTTTCC |
| | | TCCCTTACACTTTTGGCGGAGGGACCAAGGTTGAGATCAAA |
| 247 | BIIB-9-565_VL | EIVLTQSPATLSLSPGERATLSCRASQSVSSYLAWYQQKPGQAPRLLIYDASNRATGIPARFSGSGSGTD |
| | Amino Acid | FTLTISSLEPEDFAVYYCQQDSNLPFTFGGGTKVEIK |
| | Sequence | |
| 248 | BIIB-9-565_VL | GAAATTGTGTTGACACAGTCTCCAGCCACCCTGTCTTTGTCTCCAGGGGAAAGAGCCACCCTCTCCTGCA |
| | Nucleic Acid | GGGCCAGTCAGAGTGTTAGCAGCTACTTAGCCTGGTACCAACAGAAACCTGGCCAGGCTCCCAGGCTCCT |
| | Sequence | CATCTATGATGCATCCAACAGGGCCACTGGCATCCCAGCCAGGTTCAGTGGCAGTGGGTCTGGGACAGAC |
| | | TTCACTCTCACCATCAGCAGCCTAGAGCCTGAAGATTTTGCAGTTTATTACTGTCAGCAGGACAGTAATC |
| | | TCCCTTTCACTTTTGGCGGAGGGACCAAGGTTGAGATCAAA |
| 249 | BIIB-9-573_VL | EIVLTQSPGTLSLSPGERATLSCRASQSVSSSFLAWYQQKPGQAPRLLIYGASSRATGIPDRFSGSGSGT |
| | Amino Acid | DFTLTISRLEPEDFAVYYCQQSHSPPYTFGGGTKVEIK |
| | Sequence | |
| 250 | BIIB-9-573_VL | GAAATTGTGTTGACGCAGTCTCCAGGCACCCTGTCTTTGTCTCCAGGGGAAAGAGCCACCCTCTCCTGCA |
| | Nucleic Acid | GGGCCAGTCAGAGTGTTAGCAGCAGCTTCTTAGCCTGGTACCAGCAGAAACCTGGCCAGGCTCCCAGGCT |
| | Sequence | CCTCATCTATGGTGCATCCAGCAGGGCCACTGGCATCCCAGACAGGTTCAGTGGCAGTGGGTCTGGGACA |
| | | GACTTCACTCTCACCATCAGCAGACTGGAGCCTGAAGATTTTGCAGTGTATTACTGTCAGCAGTCCCACA |
| | | GTCCCCCTTACACTTTTGGCGGAGGGACCAAGGTTGAGATCAAA |
| 251 | BIIB-9-579_VL | DIQMTQSPSSLSASVGDRVTITCRASQSISSYLNWYQQKPGKAPKLLIYGASSLQSGVPSRFSGSGSGTD |
| | Amino Acid | FTLTISSLQPEDFATYYCQQAFSFPFTFGGGTKVEIK |
| | Sequence | |
| 252 | BIIB-9-579_VL | GACATCCAGATGACCCAGTCTCCATCCTCCCTGTCTGCATCTGTAGGAGACAGAGTCACCATCACTTGCC |
| | Nucleic Acid | GGGCAAGTCAGAGCATTAGCAGCTATTTAAATTGGTATCAGCAGAAACCAGGGAAAGCCCCTAAGCTCCT |
| | Sequence | GATCTATGGTGCATCCAGTTTGCAAAGTGGGGTCCCATCAAGGTTCAGTGGCAGTGGATCTGGGACAGAT |
| | | TTCACTCTCACCATCAGCAGTCTGCAACCTGAAGATTTTGCAACTTACTACTGTCAGCAAGCATTCAGTT |
| | | TCCCTTTCACTTTTGGCGGAGGGACCAAGGTTGAGATCAAA |
| 253 | BIIB-9-581_VL | DIQMTQSPSSLSASVGDRVTITCRASQSISSYLNWYQQKPGKAPKLLIYAASSLQSGVPSRFSGSGSGTD |
| | Amino Acid | FTLTISSLQPEDFATYYCQQSDLFPFTFGGGTKVEIK |
| | Sequence | |
| 254 | BIIB-9-581_VL | GACATCCAGATGACCCAGTCTCCATCCTCCCTGTCTGCATCTGTAGGAGACAGAGTCACCATCACTTGCC |
| | Nucleic Acid | GGGCAAGTCAGAGCATTAGCAGCTATTTAAATTGGTATCAGCAGAAACCAGGGAAAGCCCCTAAGCTCCT |
| | Sequence | GATCTATGCTGCATCCAGTTTGCAAAGTGGGGTCCCATCAAGGTTCAGTGGCAGTGGATCTGGGACAGAT |
| | | TTCACTCTCACCATCAGCAGTCTGCAACCTGAAGATTTTGCAACTTACTACTGTCAGCAAAGCGACCTCT |
| | | TCCCTTTCACTTTTGGCGGAGGGACCAAGGTTGAGATCAAA |
| 255 | BIIB-9-582_VL | DIQMTQSPSSLSASVGDRVTITCQASQDISNYLNWYQQKPGKAPKLLIYDASNLETGVPSRFSGSGSGTD |
| | Amino Acid | FTFTISSLQPEDIATYYCQQADILPPTFGGGTKVEIK |
| | Sequence | |
| 256 | BIIB-9-582_VL | GACATCCAGATGACCCAGTCTCCATCCTCCCTGTCTGCATCTGTAGGAGACAGAGTCACCATCACTTGCC |
| | Nucleic Acid | AGGCGAGTCAGGACATTAGCAACTATTTAAATTGGTATCAGCAGAAACCAGGGAAAGCCCCTAAGCTCCT |
| | Sequence | GATCTACGATGCATCCAATTTGGAAACAGGGGTCCCATCAAGGTTCAGTGGAAGTGGATCTGGGACAGAT |
| | | TTTACTTTCACCATCAGCAGCCTGCAGCCTGAAGATATTGCAACATATTACTGTCAGCAGGCCGATATCC |
| | | TCCCTCCTACTTTTGGCGGAGGGACCAAGGTTGAGATCAAA |
| 257 | BIIB-9-585_VL | DIQMTQSPSSVSASVGDRVTITCRASQGISSWLAWYQQKPGKAPKLLIYAASSLQSGVPSRFSGSGSGTD |
| | Amino Acid | FTLTISSLQPEDFATYYCQQANSYPITFGGGTKVEIK |
| | Sequence | |
| 258 | BIIB-9-585_VL | GACATCCAGATGACCCAGTCTCCATCTTCCGTGTCTGCATCTGTAGGAGACAGAGTCACCATCACTTGTC |
| | Nucleic Acid | GGGCGAGTCAGGGTATTAGCAGCTGGTTAGCCTGGTATCAGCAGAAACCAGGGAAAGCCCCTAAGCTCCT |
| | Sequence | GATCTATGCTGCATCCAGTTTGCAAAGTGGGGTCCCATCAAGGTTCAGCGGCAGTGGATCTGGGACAGAT |
| | | TTCACTCTCACCATCAGCAGCCTGCAGCCTGAAGATTTTGCAACTTATTACTGTCAGCAGGCAAATAGTT |
| | | ACCCTATCACTTTTGGCGGAGGGACCAAGGTTGAGATCAAA |
| 259 | BIIB-9-587_VL | DIQMTQSPSSVSASVGDRVTITCRASQGISSWLAWYQQKPGKAPKLLIYAASSLQSGVPSRFSGSGSGTD |
| | Amino Acid | FTLTISSLQPEDFATYYCQQADSFPFTFGGGTKVEIK |
| | Sequence | |
| 260 | BIIB-9-587_VL | GACATCCAGATGACCCAGTCTCCATCTTCCGTGTCTGCATCTGTAGGAGACAGAGTCACCATCACTTGTC |
| | Nucleic Acid | GGGCGAGTCAGGGTATTAGCAGCTGGTTAGCCTGGTATCAGCAGAAACCAGGGAAAGCCCCTAAGCTCCT |
| | Sequence | GATCTATGCTGCATCCAGTTTGCAAAGTGGGGTCCCATCAAGGTTCAGCGGCAGTGGATCTGGGACAGAT |
| | | TTCACTCTCACCATCAGCAGCCTGCAGCCTGAAGATTTTGCAACTTATTACTGTCAGCAGGCAGACAGTT |
| | | TCCCTTTCACTTTTGGCGGAGGGACCAAGGTTGAGATCAAA |
| 261 | BIIB-9-590_VL | EIVLTQSPATLSLSPGERATLSCRASQSVSSYLAWYQQKPGQAPRLLIYDASNRATGIPARFSGSGSGTD |
| | Amino Acid | FTLTISSLEPEDFAVYYCQQVDNFPLTFGGGTKVEIK |
| | Sequence | |
| 262 | BIIB-9-590_VL | GAAATTGTGTTGACACAGTCTCCAGCCACCCTGTCTTTGTCTCCAGGGGAAAGAGCCACCCTCTCCTGCA |
| | Nucleic Acid | GGGCCAGTCAGAGTGTTAGCAGCTACTTAGCCTGGTACCAACAGAAACCTGGCCAGGCTCCCAGGCTCCT |
| | Sequence | CATCTATGATGCATCCAACAGGGCCACTGGCATCCCAGCCAGGTTCAGTGGCAGTGGGTCTGGGACAGAC |
| | | TTCACTCTCACCATCAGCAGCCTAGAGCCTGAAGATTTTGCAGTTTATTACTGTCAGCAGGTCGACAATT |
| | | TCCCTCTCACTTTTGGCGGAGGGACCAAGGTTGAGATCAAA |
| 263 | BIIB-9-592_VL | DIQMTQSPSSLSASVGDRVTITCRASQSISSYLNWYQQKPGKAPKLLIYAASSLQSGVPSRFSGSGSGTD |
| | Amino Acid | FTLTISSLQPEDFATYYCQQPYDTPITFGGGTKVEIK |
| | Sequence | |
| 264 | BIIB-9-592_VL | GACATCCAGATGACCCAGTCTCCATCCTCCCTGTCTGCATCTGTAGGAGACAGAGTCACCATCACTTGCC |
| | Nucleic Acid | GGGCAAGTCAGAGCATTAGCAGCTATTTAAATTGGTATCAGCAGAAACCAGGGAAAGCCCCTAAGCTCCT |
| | Sequence | GATCTATGCTGCATCCAGTTTGCAAAGTGGGGTCCCATCAAGGTTCAGTGGCAGTGGATCTGGGACAGAT |
| | | TTCACTCTCACCATCAGCAGTCTGCAACCTGAAGATTTTGCAACTTACTACTGTCAGCAACCATACGACA |
| | | CTCCTATCACTTTTGGCGGAGGGACCAAGGTTGAGATCAAA |
| 265 | BIIB-9-606_VL | DIQMTQSPSSLSASVGDRVTITCQASQDISNYLNWYQQKPGKAPKLLIYDASNLETGVPSRFSGSGSGTD |
| | Amino Acid | FTFTISSLQPEDIATYYCQQSDLFPFTFGGGTKVEIK |
| | Sequence | |
| 266 | BIIB-9-606_VL | GACATCCAGATGACCCAGTCTCCATCCTCCCTGTCTGCATCTGTAGGAGACAGAGTCACCATCACTTGCC |
| | Nucleic Acid | AGGCGAGTCAGGACATTAGCAACTATTTAAATTGGTATCAGCAGAAACCAGGGAAAGCCCCTAAGCTCCT |
| | Sequence | GATCTACGATGCATCCAATTTGGAAACAGGGGTCCCATCAAGGTTCAGTGGAAGTGGATCTGGGACAGAT |
| | | TTTACTTTCACCATCAGCAGCCTGCAGCCTGAAGATATTGCAACATATTACTGTCAGCAGTCCGATCTCT |
| | | TCCCTTTCACTTTTGGCGGAGGGACCAAGGTTGAGATCAAA |
| 267 | BIIB-9-608_VL | DIVMTQSPDSLAVSLGERATINCKSSQSVLYSSNNKNYLAWYQQKPGQPPKLLIYWASTRESGVPDRFSG |
| | Amino Acid | SGSGTDFTLTISSLQAEDVAVYYCQQFLYTPTFGGGTKVEIK |
| | Sequence | |
| 268 | BIIB-9-608_VL | GACATCGTGATGACCCAGTCTCCAGACTCCCTGGCTGTGTCTCTGGGCGAGAGGGCCACCATCAACTGCA |
| | Nucleic Acid | AGTCCAGCCAGAGTGTTTTATACAGCTCCAACAATAAGAACTACTTAGCTTGGTACCAGCAGAAACCAGG |
| | Sequence | ACAGCCTCCTAAGCTGCTCATTTACTGGGCATCTACCCGGGAATCCGGGGTCCCTGACCGATTCAGTGGC |
| | | AGCGGGTCTGGGACAGATTTCACTCTCACCATCAGCAGCCTGCAGGCTGAAGATGTGGCAGTTTATTACT |
| | | GTCAGCAGTTCCTCTACACTCCTACTTTTGGCGGAGGGACCAAGGTTGAGATCAAA |
| 269 | BIIB-9-616_VL | EIVMTQSPATLSVSPGERATLSCRASQSVSSSLAWYQQKPGQAPRLLIYGASTRATGIPARFSGSGSGTE |
| | Amino Acid | FTLTISSLQSEDFAVYYCQQADNFPFTFGGGTKVEIK |
| | Sequence | |
| 270 | BIIB-9-616_VL | GAAATAGTGATGACGCAGTCTCCAGCCACCCTGTCTGTGTCTCCAGGGGAAAGAGCCACCCTCTCCTGCA |
| | Nucleic Acid | GGGCCAGTCAGAGTGTTAGCAGCAGCTTAGCCTGGTACCAGCAGAAACCTGGCCAGGCTCCCAGGCTCCT |
| | Sequence | CATCTATGGTGCATCCACCAGGGCCACTGGTATCCCAGCCAGGTTCAGTGGCAGTGGGTCTGGGACAGAG |
| | | TTCACTCTCACCATCAGCAGCCTGCAGTCTGAAGATTTTGCAGTTTATTACTGTCAGCAGGCCGACAATT |
| | | TCCCTTTCACTTTTGGCGGAGGGACCAAGGTTGAGATCAAA |
| 271 | BIIB-9-621_VL | DIVMTQSPDSLAVSLGERATINCKSSQSVLYSSNNKNYLAWYQQKPGQPPKLLIYWASTRESGVPDRFSG |
| | Amino Acid | SGSGTDFTLTISSLQAEDVAVYYCQQFYLPPWTFGGGTKVEIK |
| | Sequence | |
| 272 | BIIB-9-621_VL | GACATCGTGATGACCCAGTCTCCAGACTCCCTGGCTGTGTCTCTGGGCGAGAGGGCCACCATCAACTGCA |
| | Nucleic Acid | AGTCCAGCCAGAGTGTTTTATACAGCTCCAACAATAAGAACTACTTAGCTTGGTACCAGCAGAAACCAGG |
| | Sequence | TACAGCCTCCTAAGCTGCTCATTTACGGGCATCTACCCGGGAATCCGGGGTCCCTGACCGATTCAGTGGC |
| | | AGCGGGTCTGGGACAGATTTCACTCTCACCATCAGCAGCCTGCAGGCTGAAGATGTGGCAGTTTATTACT |
| | | GTCAGCAGTTCTACCTCCCCCCTTGGACTTTTGGCGGAGGGACCAAGGTTGAGATCAAA |
| 273 | BIIB-9-622_VL | EIVMTQSPATLSVSPGERATLSCRASQSVSSSLAWYQQKPGQAPRLLIYGASTRATGIPARFSGSGSGTE |
| | Amino Acid | FTLTISSLQSEDFAVYYCQQHSTWPPTFGGGTKVEIK |
| | Sequence | |
| 274 | BIIB-9-622_VL | GAAATAGTGATGACGCAGTCTCCAGCCACCCTGTCTGTGTCTCCAGGGGAAAGAGCCACCCTCTCCTGCA |
| | Nucleic Acid | GGGCCAGTCAGAGTGTTAGCAGCAGCTTAGCCTGGTACCAGCAGAAACCTGGCCAGGCTCCCAGGCTCCT |
| | Sequence | CATCTATGGTGCATCCACCAGGGCCACTGGTATCCCAGCCAGGTTCAGTGGCAGTGGGTCTGGGACAGAG |
| | | TTCACTCTCACCATCAGCAGCCTGCAGTCTGAAGATTTTGCAGTTTATTACTGTCAGCAGCACTCCACCT |
| | | GGCCTCCTACTTTTGGCGGAGGGACCAAGGTTGAGATCAAA |
| 275 | BIIB-9-627_VL | DIVMTQSPLSLPVTPGEPASISCRSSQSLLHSNGYNYLDWYLQKPGQSPQLLIYLGSNRASGVPDRFSGS |
| | Amino Acid | GSGTDFTLKISRVEAEDVGVYYCMQARERPWTFGGGTKVEIK |
| | Sequence | |
| 276 | BIIB-9-627_VL | GATATTGTGATGACTCAGTCTCCACTCTCCCTGCCCGTCACCCCTGGAGAGCCGGCCTCCATCTCCTGCA |
| | Nucleic Acid | GGTCTAGTCAGAGCCTCCTGCATAGTAATGGATACAACTATTTGGATTGGTACCTGCAGAAGCCAGGGCA |
| | Sequence | GTCTCCACAGCTCCTGATCTATTTGGGTTCTAATCGGGCCTCCGGGGTCCCTGACAGGTTCAGTGGCAGT |
| | | GGATCAGGCACAGATTTTACACTGAAAATCAGCAGAGTGGAGGCTGAGGATGTTGGGGTTTATTACTGCA |
| | | TGCAGGCACGAGAACGCCCTTGGACTTTTGGCGGAGGGACCAAGGTTGAGATCAAA |

Class II Antibodies _VL Sequences

| | | |
|---|---|---|
| 277 | BIIB-9-408_VL | EIVLTQSPATLSLSPGERATLSCRASQSVSSYLAWYQQKPGQAPRLLIYDASNRATGIPARFSGSGSGTD |
| | Amino Acid | FTLTISSLEPEDFAVYYCQQAFVWPPITFGGGTKVEIK |
| | Sequence | |
| 278 | BIIB-9-408_VL | GAAATTGTGTTGACACAGTCTCCAGCCACCCTGTCTTTGTCTCCAGGGGAAAGAGCCACCCTCTCCTGCA |
| | Nucleic Acid | GGGCCAGTCAGAGTGTTAGCAGCTACTTAGCCTGGTACCAACAGAAACCTGGCCAGGCTCCCAGGCTCCT |
| | Sequence | CATCTATGATGCATCCAACAGGGCCACTGGCATCCCAGCCAGGTTCAGTGGCAGTGGGTCTGGGACAGAC |
| | | TTCACTCTCACCATCAGCAGCCTAGAGCCTGAAGATTTTGCAGTTTATTACTGTCAGCAGGCCTTCGTCT |
| | | GGCCTCCTATCACTTTTGGCGGAGGGACCAAGGTTGAGATCAAA |
| 279 | BIIB-9-416_VL | EIVMTQSPATLSLSPGERATLSCRASQSVSSYLAWYQQKPGQAPRLLIYDSSNRATGIPARFSGSGSGTD |
| | Amino Acid | FTLTISSLEPEDFAVYYCQQRVVWPPTFGGGTKVEIK |
| | Sequence | |
| 280 | BIIB-9-416_VL | GAAATTGTGATGACACAGTCTCCAGCCACCCTGTCTTTGTCTCCAGGGGAAAGAGCCACCCTCTCCTGCA |
| | Nucleic Acid | GGGCCAGTCAGAGTGTTAGCAGCTACTTAGCCTGGTACCAACAGAAACCTGGCCAGGCTCCCAGGCTCCT |
| | Sequence | CATCTATGATTCATCCAACAGGGCCACTGGCATCCCAGCCAGGTTCAGTGGCAGTGGGTCTGGGACAGAC |
| | | TTCACTCTCACCATCAGCAGCCTAGAGCCTGAAGATTTTGCAGTTTATTACTGTCAGCAGAGAGTCGTCT |
| | | GGCCTCCTACTTTTGGCGGAGGGACCAAGGTTGAGATCAAA |
| 281 | BIIB-9-629_VL | DIQLTQSPSSLSASVGDRVTITCQASQDISNYLNWYQQKPGKAPKLLIYDASNLETGVPSRFSGSGSGTD |
| | Amino Acid | FTFTISSLQPEDIATYYCQQLDSLPPTFGGGTKVEIK |
| | Sequence | |
| 282 | BIIB-9-629_VL | GACATCCAGTTGACCCAGTCTCCATCCTCCCTGTCTGCATCTGTAGGAGACAGAGTCACCATCACTTGCC |
| | Nucleic Acid | AGGCGAGTCAGGACATTAGCAACTATTTAAATTGGTATCAGCAGAAACCAGGGAAAGCCCCTAAGCTCCT |
| | Sequence | GATCTACGATGCATCCAATTTGGAAACAGGGGTCCCATCAAGGTTCAGTGGAAGTGGATCTGGGACAGAT |
| | | TTTACTTTCACCATCAGCAGCCTGCAGCCTGAAGATATTGCAACATATTACTGTCAGCAGCTCGATTCCC |
| | | TCCCTCCTACTTTTGGCGGAGGGACCAAGGTTGAGATCAAA |
| 283 | BIIB-9-885_VL | EIVLTQSPATLSLSPGERATLSCRASQSVSSYLAWYQQKPGQAPRLLIYDASKRATGIPARFSGSGSGTD |
| | Amino Acid | FTLTISSLEPEDFAVYYCQQRVIWPPTFGGGTKVEIK |
| | Sequence | |
| 284 | BIIB-9-885_VL | GAAATTGTGTTGACACAGTCTCCAGCCACCCTGTCTTTGTCTCCAGGGGAAAGAGCCACCCTCTCCTGCA |
| | Nucleic Acid | GGGCCAGTCAGAGTGTTAGCAGCTACTTAGCCTGGTACCAACAGAAACCTGGCCAGGCTCCCAGGCTCCT |
| | Sequence | CATCTATGATGCATCCAAAAGGGCCACTGGCATCCCAGCCAGGTTCAGTGGCAGTGGGTCTGGGACAGAC |
| | | TTCACTCTCACCATCAGCAGCCTAGAGCCTGAAGATTTTGCAGTTTATTACTGTCAGCAGAGAGTCATCT |
| | | GGCCTCCTACTTTTGGCGGAGGGACCAAGGTTGAGATCAAA |

Class III Antibodies _VL Sequences

| | | |
|---|---|---|
| 285 | BIIB-9-607_VL | DIQMTQSPSTLSASVGDRVTITCRASQSISSWLAWYQQKPGKAPKLLIYKASSLESGVPSRFSGSGSGTE |
| | Amino Acid | FTLTISSLQPDDFATYYCQQAGRYPLTFGGGTKVEIK |
| | Sequence | |
| 286 | BIIB-9-607_VL | GACATCCAGATGACCCAGTCTCCTTCCACCCTGTCTGCATCTGTAGGAGACAGAGTCACCATCACTTGCC |
| | Nucleic Acid | GGGCCAGTCAGAGTATTAGTAGCTGGTTGGCCTGGTATCAGCAGAAACCAGGGAAAGCCCCTAAGCTCCT |
| | Sequence | GATCTATAAAGCCTCCAGTTTGGAAAGTGGGGTCCCATCAAGGTTCAGCGGCAGTGGATCTGGGACAGAA |
| | | TTCACTCTCACCATCAGCAGCCTGCAGCCTGATGATTTTGCAACTTATTACTGCCAGCAGGCCGGACGCT |
| | | ACCCTCTCACTTTTGGCGGAGGGACCAAGGTTGAGATCAAA |
| 287 | BIIB-9-471_VL | EIVLTQSPATLSLSPGERATLSCRASQSVSRYLAWYQQKPGQAPRLLIYDASNRATGIPARFSGSGSGTD |
| | Amino Acid | FTLTISSLEPEDFAVYYCQQDYNYPFTFGGGTKVEIK |
| | Sequence | |
| 288 | BIIB-9-471_VL | GAAATTGTGTTGACACAGTCTCCAGCCACCCTGTCTTTGTCTCCAGGGGAAAGAGCCACCCTCTCCTGCA |
| | Nucleic Acid | GGGCCAGTCAGAGTGTTAGCAGGTACTTAGCCTGGTACCAACAGAAACCTGGCCAGGCTCCCAGGCTCCT |
| | Sequence | CATCTATGATGCATCCAACAGGGCCACTGGCATCCCAGCCAGGTTCAGTGGCAGTGGGTCTGGGACAGAC |
| | | TTCACTCTCACCATCAGCAGCCTAGAGCCTGAAGATTTTGCAGTTTATTACTGTCAGCAGGACTACAATT |
| | | ACCCTTTCACTTTTGGCGGAGGGACCAAGGTTGAGATCAAA |
| 289 | BIIB-9-472_VL | EIVLTQSPATLSLSPGERATLSCRASQSVSSYLAWYQQKPGQAPRLLIYDASNRATGIPARFSGSGSGTD |
| | Amino Acid | FTLTISSLEPEDFAVYYCQQRSDWPTFGGGTKVEIK |
| | Sequence | |
| 290 | BIIB-9-472_VL | GAAATTGTGTTGACACAGTCTCCAGCCACCCTGTCTTTGTCTCCAGGGGAAAGAGCCACCCTCTCCTGCA |
| | Nucleic Acid | GGGCCAGTCAGAGTGTTAGCAGCTACTTAGCCTGGTACCAACAGAAACCTGGCCAGGCTCCCAGGCTCCT |
| | Sequence | CATCTATGATGCATCCAACAGGGCCACTGGCATCCCAGCCAGGTTCAGTGGCAGTGGGTCTGGGACAGAC |
| | | TTCACTCTCACCATCAGCAGCCTAGAGCCTGAAGATTTTGCAGTTTATTACTGTCAGCAGAGATCCGACT |
| | | GGCCTACTTTTGGCGGAGGGACCAAGGTTGAGATCAAA |
| 291 | BIIB-9-439_VL | EIVMTQSPATLSLSPGERATLSCRASQSVSSYLAWYQQKPGQAPRLLIYDSSNRATGIPARFSGSGSGTD |
| | Amino Acid | FTLTISSLEPEDFAVYYCQQRDNWPFTFGGGTKVEIK |
| | Sequence | |
| 292 | BIIB-9-439_VL | GAAATTGTGATGACACAGTCTCCAGCCACCCTGTCTTTGTCTCCAGGGGAAAGAGCCACCCTCTCCTGCA |
| | Nucleic Acid | GGGCCAGTCAGAGTGTTAGCAGCTACTTAGCCTGGTACCAACAGAAACCTGGCCAGGCTCCCAGGCTCCT |
| | Sequence | CATCTATGATTCATCCAACAGGGCCACTGGCATCCCAGCCAGGTTCAGTGGCAGTGGGTCTGGGACAGAC |
| | | TTCACTCTCACCATCAGCAGCCTAGAGCCTGAAGATTTTGCAGTTTATTACTGTCAGCAGAGAGACAACT |
| | | GGCCTTTCACTTTTGGCGGAGGGACCAAGGTTGAGATCAAA |
| 293 | BIIB-9-446_VL | EIVLTQSPGTLSLSPGERATLSCRASQSVSSSYLAWYQQKPGQAPRLLIYGASRRATGIPDRFSGSGSGT |
| | Amino Acid | DFTLTISRLEPEDFAVYYCQQYGNSPLTFGGGTKVEIK |
| | Sequence | |
| 294 | BIIB-9-446_VL | GAAATTGTGTTGACGCAGTCTCCAGGCACCCTGTCTTTGTCTCCAGGGGAAAGAGCCACCCTCTCCTGCA |
| | Nucleic Acid | GGGCCAGTCAGAGTGTTAGCAGCAGCTACTTAGCCTGGTACCAGCAGAAACCTGGCCAGGCTCCCAGGCT |
| | Sequence | CCTCATCTATGGTGCATCCAGAAGGGCCACTGGCATCCCAGACAGGTTCAGTGGCAGTGGGTCTGGGACA |
| | | GACTTCACTCTCACCATCAGCAGACTGGAGCCTGAAGATTTTGCAGTGTATTACTGTCAGCAGTACGGAA |
| | | ACAGTCCTCTCACTTTTGGCGGAGGGACCAAGGTTGAGATCAAA |
| 295 | BIIB-9-568_VL | DIQMTQSPSSLSASVGDRVTITCQASQDISNYLNWYQQKPGKAPKLLIYDASNLETGVPSRFSGSGSGTD |
| | Amino Acid | FTFTISSLQPEDIATYYCQQYDDYLTFGGGTKVEIK |
| | Sequence | |
| 296 | BIIB-9-568_VL | GACATCCAGATGACCCAGTCTCCATCCTCCCTGTCTGCATCTGTAGGAGACAGAGTCACCATCACTTGCC |
| | Nucleic Acid | AGGCGAGTCAGGACATTAGCAACTATTTAAATTGGTATCAGCAGAAACCAGGGAAAGCCCCTAAGCTCCT |
| | Sequence | GATCTACGATGCATCCAATTTGGAAACAGGGGTCCCATCAAGGTTCAGTGGAAGTGGATCTGGGACAGAT |
| | | TTTACTTTCACCATCAGCAGCCTGCAGCCTGAAGATATTGCAACATATTACTGTCAGCAGTACGATGACT |
| | | ACCTCACTTTTGGCGGAGGGACCAAGGTTGAGATCAAA |
| 297 | BIIB-9-615_VL | EIVLTQSPATLSLSPGERATLSCRASQSVSSYLAWYQQKPGQAPRLLIYDASNRATGIPARFSGSGSGTD |
| | Amino Acid | FTLTISSLEPEDFAVYYCQQSCHWPWTFGGGTKVEIK |
| | Sequence | |
| 298 | BIIB-9-615_VL | GAAATTGTGTTGACACAGTCTCCAGCCACCCTGTCTTTGTCTCCAGGGGAAAGAGCCACCCTCTCCTGCA |
| | Nucleic Acid | GGGCCAGTCAGAGTGTTAGCAGCTACTTAGCCTGGTACCAACAGAAACCTGGCCAGGCTCCCAGGCTCCT |
| | Sequence | CATCTATGATGCATCCAACAGGGCCACTGGCATCCCAGCCAGGTTCAGTGGCAGTGGGTCTGGGACAGAC |
| | | TTCACTCTCACCATCAGCAGCCTAGAGCCTGAAGATTTTGCAGTTTATTACTGTCAGCAGTCCTGTCACT |
| | | GGCCTTGGACTTTTGGCGGAGGGACCAAGGTTGAGATCAAA |
| 299 | BIIB-9-628_VL | EIVLTQSPGTLSLSPGERATLSCRASQSVSSDYLAWYQQKPGQAPRLLIYGASSRATGIPDRFSGSGSGT |
| | Amino Acid | DFTLTISRLEPEDFAVYYCQQYWFPFTFGGGTKVEIK |
| | Sequence | |
| 300 | BIIB-9-628_VL | GAAATTGTGTTGACGCAGTCTCCAGGCACCCTGTCTTTGTCTCCAGGGGAAAGAGCCACCCTCTCCTGCA |
| | Nucleic Acid | GGGCCAGTCAGAGTGTTAGCAGCGACTACTTAGCCTGGTACCAGCAGAAACCTGGCCAGGCTCCCAGGCT |
| | Sequence | CCTCATCTATGGTGCATCCAGCAGGGCCACTGGCATCCCAGACAGGTTCAGTGGCAGTGGGTCTGGGACA |
| | | GACTTCACTCTCACCATCAGCAGACTGGAGCCTGAAGATTTTGCAGTGTATTACTGTCAGCAGTACGTCG |
| | | TCTTCCCTTTCACTTTTGGCGGAGGGACCAAGGTTGAGATCAAA |
| 301 | BIIB-9-882_VL | EIVMTQSPATLSVSPGERATLSCRASQSVSSNLAWYQQKPGQAPRLLIFGASTRATGIPARFSGSGSGTE |
| | Amino Acid | FTLTISSLQSEDFAVYYCQQHDNFPPTFGGGTKVEIK |
| | Sequence | |
| 302 | BIIB-9-882_VL | GAAATAGTGATGACGCAGTCTCCAGCCACCCTGTCTGTGTCTCCAGGGGAAAGAGCCACCCTCTCCTGCA |
| | Nucleic Acid | GGGCCAGTCAGAGTGTTAGCAGCAACTTAGCCTGGTACCAGCAGAAACCTGGCCAGGCTCCCAGGCTCCT |
| | Sequence | CATCTTTGGTGCATCCACCAGGGCCACTGGTATCCCAGCCAGGTTCAGTGGCAGTGGGTCTGGGACAGAG |
| | | TTCACTCTCACCATCAGCAGCCTGCAGTCTGAAGATTTTGCAGTTTATTACTGTCAGCAGCACGACAATT |
| | | TCCCTCCTACTTTTGGCGGAGGGACCAAGGTTGAGATCAAA |
| 303 | BIIB-9-884_VL | EIVLTQSPGTLSLSPGERATLSCRASQSVSSSYLAWYQQKPGQAPRLLIYGASSRATGIPDRFSGSGSGT |
| | Amino Acid | DFTLTISRLEPEDFAVYYCQQYHLLPPTFGGGTKVEIK |
| | Sequence | |
| 304 | BIIB-9-884_VL | GAAATTGTGTTGACGCAGTCTCCAGGCACCCTGTCTTTGTCTCCAGGGGAAAGAGCCACCCTCTCCTGCA |
| | Amino Acid | GGGCCAGTCAGAGTGTTAGCAGCAGCTACTTAGCCTGGTACCAGCAGAAACCTGGCCAGGCTCCCAGGCT |
| | Sequence | CCTCATCTATGGTGCATCCAGCAGGGCCACTGGCATCCCAGACAGGTTCAGTGGCAGTGGGTCTGGGACA |
| | | GACTTCACTCTCACCATCAGCAGACTGGAGCCTGAAGATTTTGCAGTGTATTACTGTCAGCAGTACCACC |
| | | TCCTCCCTCCTACTTTTGGCGGAGGGACCAAGGTTGAGATCAAA |
| 305 | BIIB-9-886_VL | DIQMTQSPSSVSASVGDRVTITCRASQGISSWLAWYQQKPGKAPKLLIYAASSLQSGVPSRFSGSGSGTD |
| | Amino Acid | FTLTISSLQPEDFATYYCQQASSFPFTFGGGTKVEIK |
| | Sequence | |
| 306 | BIIB-9-886_VL | GACATCCAGATGACCCAGTCTCCATCTTCCGTGTCTGCATCTGTAGGAGACAGAGTCACCATCACTTGTC |
| | Nucleic Acid | GGGCGAGTCAGGGTATTAGCAGCTGGTTAGCCTGGTATCAGCAGAAACCAGGGAAAGCCCCTAAGCTCCT |
| | Sequence | GATCTATGCTGCATCCAGTTTGCAAAGTGGGGTCCCATCAAGGTTCAGCGGCAGTGGATCTGGGACAGAT |
| | | TTCACTCTCACCATCAGCAGCCTGCAGCCTGAAGATTTTGCAACTTATTACTGTCAGCAGGCATCCAGTT |
| | | TCCCTTTCACTTTTGGCGGAGGGACCAAGGTTGAGATCAAA |
| 307 | BIIB-9-887_VL | DIQMTQSPSSVSASVGDRVTITCRASQGISSWLAWYQQKPGKAPKLLIYAASSLQSGVPSRFSGSGSGTD |
| | Amino Acid | FTLTISSLQPEDFATYYCQQASSFPFTFGGGTKVEIK |
| | Sequence | |
| 308 | BIIB-9-887_VL | GACATCCAGATGACCCAGTCTCCATCTTCCGTGTCTGCATCTGTAGGAGACAGAGTCACCATCACTTGTC |
| | Nucleic Acid | GGGCGAGTCAGGGTATTAGCAGCTGGTTAGCCTGGTATCAGCAGAAACCAGGGAAAGCCCCTAAGCTCCT |
| | Sequence | GATCTATGCTGCATCCAGTTTGCAAAGTGGGGTCCCATCAAGGTTCAGCGGCAGTGGATCTGGGACAGAT |
| | | TTCACTCTCACCATCAGCAGCCTGCAGCCTGAAGATTTTGCAACTTATTACTGTCAGCAGGCATCCAGTT |
| | | TCCCTTTCACTTTTGGCGGAGGGACCAAGGTTGAGATCAAA |
| 309 | BIIB-9-888_VL | EIVMTQSPATLSVSPGERATLSCRASQSVSSNLAWYQQKPGQAPRLLIYGASTRATGIPARFSGSGSGTE |
| | Amino Acid | FTLTISSLQPEDFAVYYCQQAFNWPPTFGGGTKVEIK |
| | Sequence | |
| 310 | BIIB-9-888_VL | GAAATAGTGATGACGCAGTCTCCAGCCACCCTGTCTGTGTCTCCAGGGGAAAGGGCCACCCTCTCCTGCA |
| | Nucleic Acid | GGGCCAGTCAGAGTGTTAGCAGCAACTTAGCCTGGTACCAGCAGAAACCTGGCCAGGCTCCCAGGCTCCT |
| | Sequence | CATCTATGGTGCATCCACCAGGGCCACTGGTATCCCAGCCAGGTTCAGTGGCAGTGGGTCTGGGACAGAG |
| | | TTCACTCTCACCATCAGCAGCCTGCAGCCTGAAGATTTTGCAGTTTATTACTGTCAGCAGGCCTTCAACT |
| | | GGCCTCCTACTTTTGGCGGAGGGACCAAGGTTGAGATCAAA |
| 311 | BIIB-9-889_VL | EIVMTQSPATLSVSPGERATLSCRASQSVSSNLAWYQQKPGQAPRLLIYGASTRATGIPARFSGSGSGTE |
| | Amino Acid | FTLTISSLQSEDFAVYYCQQAFNWPPTFGGGTKVEIK |
| | Sequence | |
| 312 | BIIB-9-889_VL | GAAATAGTGATGACGCAGTCTCCAGCCACCCTGTCTGTGTCTCCAGGGGAAAGAGCCACCCTCTCCTGCA |
| | Nucleic Acid | GGGCCAGTCAGAGTGTTAGCAGCAACTTAGCCTGGTACCAGCAGAAACCTGGCCAGGCTCCCAGGCTCCT |
| | Sequence | CATCTATGGTGCATCCACCAGGGCCACTGGTATCCCAGCCAGGTTCAGTGGCAGTGGGTCTGGGACAGAG |
| | | TTCACTCTCACCATTAGCAGCCTGCAGTCTGAAGATTTTGCAGTTTATTACTGTCAGCAGGCCTTCAACT |
| | | GGCCTCCTACTTTTGGCGGAGGGACCAAGGTTGAGATCAAA |
| 313 | BIIB-9-433_VL | EIVLTQSPATLSLSPGERATLSCRASQSVSSYLAWYQQKPGQAPRLLIYDASNRATGIPARFSGSGSGTD |
| | Amino Acid | FTLTISSLEPEDFAVYYCQQSSAYPPTFGGGTKVEIK |
| | Sequence | |
| 314 | BIIB-9-433_VL | GAAATTGTGTTGACACAGTCTCCAGCCACCCTGTCTTTGTCTCCAGGGGAAAGAGCCACCCTCTCCTGCA |
| | Nucleic Acid | GGGCCAGTCAGAGTGTTAGCAGCTACTTAGCCTGGTACCAACAGAAACCTGGCCAGGCTCCCAGGCTCCT |
| | Sequence | CATCTATGATGCATCCAACAGGGCCACTGGCATCCCAGCCAGGTTCAGTGGCAGTGGGTCTGGGACAGAC |
| | | TTCACTCTCACCATCAGCAGCCTAGAGCCTGAAGATTTTGCAGTTTATTACTGTCAGCAGTCCAGTGCCT |
| | | ACCCTCCTACTTTTGGCGGAGGGACCAAGGTTGAGATCAAA |
| 315 | BIIB-9-445_VL | EIVMTQSPATLSVSPGERATLSCRASQSVSSNLAWYQQKPGQAPRLLIYSASTRATGIPARFSGSGSGTE |
| | Amino Acid | FTLTISSLQSEDFAVYYCQQYDNFPFTFGGGTKVEIK |
| | Sequence | |
| 316 | BIIB-9-445_VL | GAAATAGTGATGACGCAGTCTCCAGCCACCCTGTCTGTGTCTCCAGGGGAAAGAGCCACCCTCTCCTGCA |
| | Nucleic Acid | GGGCCAGTCAGAGTGTTAGCAGCAACTTAGCCTGGTACCAGCAGAAACCTGGCCAGGCTCCCAGGCTCCT |
| | Sequence | CATCTATAGCGCATCCACCAGGGCCACTGGTATCCCAGCCAGGTTCAGTGGCAGTGGGTCTGGGACAGAG |
| | | TTCACTCTCACCATCAGCAGCCTGCAGTCTGAAGATTTTGCAGTTTATTACTGTCAGCAGTACGACAATT |
| | | TCCCTTTCACTTTTGGCGGAGGGACCAAGGTTGAGATCAAA |
| 317 | BIIB-9-470_VL | DIQMTQSPSTLSASVGDRVTITCRASQSISSWLAWYQQKPGKAPKLLIYKASSLESGVPSRFSGSGSGTE |
| | Amino Acid | FTLTISSLQPDDFATYYCQHPHSWTFGGGTKVEIK |
| | Sequence | |
| 318 | BIIB-9-470_VL | GACATCCAGATGACCCAGTCTCCTTCCACCCTGTCTGCATCTGTAGGAGACAGAGTCACCATCACTTGCC |
| | Nucleic Acid | GGGCCAGTCAGAGTATTAGTAGCTGGTTGGCCTGGTATCAGCAGAAACCAGGGAAAGCCCCTAAGCTCCT |
| | Sequence | GATCTATAAAGCCTCCAGTTTGGAAAGTGGGGTCCCATCAAGGTTCAGCGGCAGTGGATCTGGGACAGAA |
| | | TTCACTCTCACCATCAGCAGCCTGCAGCCTGATGATTTTGCAACTTATTACTGCCAGCATCCCCACTCTT |
| | | GGACTTTTGGCGGAGGGACCAAGGTTGAGATCAAA |
| 319 | BIIB-9-625_VL | DIQMTQSPSSLSASVGDRVTITCRASQSISSYLNWYQQKPGKAPKLLIYAASSLQSGVPSRFSGSGSGTD |
| | Amino Acid | FTLTISSLQPEDFATYYCQQSDTDPPTFGGGTKVEIK |
| | Sequence | |
| 320 | BIIB-9-625_VL | GACATCCAGATGACCCAGTCTCCATCCTCCCTGTCTGCATCTGTAGGAGACAGAGTCACCATCACTTGCC |
| | Nucleic Acid | GGGCAAGTCAGAGCATTAGCAGCTATTTAAATTGGTATCAGCAGAAACCAGGGAAAGCCCCTAAGCTCCT |
| | Sequence | GATCTATGCTGCATCCAGTTTGCAAAGTGGGGTCCCATCAAGGTTCAGTGGCAGTGGATCTGGGACAGAT |
| | | TTCACTCTCACCATCAGCAGTCTGCAACCTGAAGATTTTGCAACTTACTACTGTCAGCAAAGCGACACCG |
| | | ACCCTCCTACTTTTGGCGGAGGGACCAAGGTTGAGATCAAA |
| 321 | BIIB-9-1264_VL | DIQMTQSPSSLSASVGDRVTITCQASQDITNYLNWYQQKPGKAPKLLIYDASNLETGVPSRFSGSGSGTD |
| | Amino Acid | FTFTISSLQPEDIATYYCQQVDDYPFTFGGGTKVEIK |
| | Sequence | |
| 322 | BIIB-9-1264_VL | GACATCCAGATGACCCAGTCTCCATCCTCCCTGTCTGCATCTGTAGGAGACAGAGTCACCATCACTTGCC |
| | Nucleic Acid | AGGCGAGTCAGGACATTACCAACTATTTAAATTGGTATCAGCAGAAACCAGGGAAAGCCCCTAAGCTCCT |
| | Sequence | GATCTACGATGCATCCAATTTGGAAACAGGGGTCCCATCAAGGTTCAGTGGAAGTGGATCTGGGACAGAT |
| | | TTTACTTTCACCATCAGCAGCCTGCAGCCTGAAGATATTGCAACATATTACTGTCAGCAGGTCGATGACT |
| | | ACCCTTTCACTTTTGGCGGAGGGACCAAGGTTGAGATCAAA |
| 323 | BIIB-9-1265_VL | DIQMTQSPSSVSASVGDRVTITCRASQGISSWLAWYQQKPGKAPKLLIYAASSLQSGVPSRFSGSGSGTD |
| | Amino Acid | FTLTISSLQPEDFATYYCQQGNSFPITFGGGTKVEIK |
| | Sequence | |
| 324 | BIIB-9-1265_VL | GACATCCAGATGACCCAGTCTCCATCTTCCGTGTCTGCATCTGTAGGAGACAGAGTCACCATCACTTGTC |
| | Nucleic Acid | GGGCGAGTCAGGGTATTAGCAGCTGGTTAGCCTGGTATCAGCAGAAACCAGGGAAAGCCCCTAAGCTCCT |
| | Sequence | GATCTATGCTGCATCCAGTTTGCAAAGTGGGGTCCCATCAAGGTTCAGCGGCAGTGGATCTGGGACAGAT |
| | | TTCACTCTCACCATCAGCAGCCTGCAGCCTGAAGATTTTGCAACTTATTACTGTCAGCAGGGAAATAGTT |
| | | TCCCTATCACTTTTGGCGGAGGGACCAAGGTTGAGATCAAA |
| 325 | BIIB-9-1266_VL | EIVMTQSPATLSLSPGERATLSCRASQSVSSYLAWYQQKPGQAPRLLIYDSSNRATGIPARFSGSGSGTD |
| | Amino Acid | FTLTISSLEPEDFAVYYCQQRLNFPFTFGGGTKVEIK |
| | Sequence | |
| 326 | BIIB-9-1266_VL | GAAATTGTGATGACACAGTCTCCAGCCACCCTGTCTTTGTCCCCAGGGGAAAGAGCCACCCTCTCCTGCA |
| | Nucleic Acid | GGGCCAGTCAGAGTGTTAGCAGCTACTTAGCCTGGTACCAACAGAAACCTGGCCAGGCTCCCAGGCTCCT |
| | Sequence | CATCTATGATTCATCCAACAGGGCCACTGGCATCCCAGCCAGGTTCAGTGGCAGTGGGTCTGGGACAGAC |
| | | TTCACTCTCACCATCAGCAGCCTAGAGCCTGAAGATTTTGCAGTTTATTACTGTCAGCAGAGACTCAATT |
| | | TCCCTTTCACTTTTGGCGGAGGGACCAAGGTTGAGATCAAA |
| 327 | BIIB-9-1267_VL | DIVMTQSPDSLAVSLGERATINCKSSQSVLYSSNNKNYLAWYQQKPGQPPKLLIYWASTRESGVPDRFSG |
| | Amino Acid | SGSGTDFTLTISSLQAEDVAVYYCQQHYVFPFTFGGGTKVEIK |
| | Sequence | |
| 328 | BIIB-9-1267_VL | GACATCGTGATGACCCAGTCTCCAGACTCCCTGGCTGTGTCTCTGGGCGAGAGGGCCACCATCAACTGCA |
| | Nucleic Acid | AGTCCAGCCAGAGTGTTTTATACAGCTCCAACAATAAGAACTACTTAGCTTGGTACCAGCAGAAACCAGG |
| | Sequence | ACAGCCTCCTAAGCTGCTCATTTACTGGGCATCTACCCGGGAATCCGGGGTCCCTGACCGATTCAGTGGC |
| | | AGCGGGTCTGGGACAGATTTCACTCTCACCATCAGCAGCCTGCAGGCTGAAGATGTGGCAGTTTATTACT |
| | | GTCAGCAGCACTACGTCTTCCCTTTCACTTTTGGCGGAGGGACCAAGGTTGAGATCAAA |
| 329 | BIIB-9-1268_VL | EIVMTQSPATLSLSPGERATLSCRASQSVSSYLAWYQQKPGQAPRLLIYDASNRATGIPARFSGSGSGTD |
| | Amino Acid | FTLTISSLEPEDFAVYYCQQATVWPFTFGGGTKVEIK |
| | Sequence | |
| 330 | BIIB-9-1268_VL | GAAATTGTGATGACACAGTCTCCAGCCACCCTGTCTTTGTCTCCAGGGGAAAGAGCCACCCTCTCCTGCA |
| | Nucleic Acid | GGGCCAGTCAGAGTGTTAGCAGCTACTTAGCCTGGTACCAACAGAAACCTGGCCAGGCTCCCAGGCTCCT |
| | Sequence | CATCTATGATGCATCCAACAGGGCCACTGGCATCCCAGCCAGGTTCAGTGGCAGTGGGTCTGGGACAGAC |
| | | TTCACTCTCACCATCAGCAGCCTAGAGCCTGAAGATTTTGCAGTTTATTACTGTCAGCAGGCCACCGTCT |
| | | GGCCTTTCACTTTTGGCGGAGGGACCAAGGTTGAGATCAAA |
| 331 | BIIB-9-1269_VL | DIQMTQSPSSVSASVGDRVAITCRASQGISSWLAWYQQKPGKAPKLLIYAASSLQSGVPSRFSGSGSGTD |
| | Amino Acid | FTLTISSLQPEDFATYYCQQASSFPFTFGGGTKVEIK |
| | Sequence | |
| 332 | BIIB-9-1269_VL | GACATCCAGATGACCCAGTCTCCATCTTCCGTGTCTGCATCTGTAGGAGACAGAGTCGCCATCACTTGTC |
| | Nucleic Acid | GGGCGAGTCAGGGTATTAGCAGCTGGTTAGCCTGGTATCAGCAGAAACCAGGGAAAGCCCCTAAGCTCCT |
| | Sequence | GATCTATGCTGCATCCAGTTTGCAAAGTGGGGTCCCATCAAGGTTCAGCGGCAGTGGATCTGGGACAGAT |
| | | TTCACTCTCACCATCAGCAGCCTGCAGCCTGAAGATTTTGCAACTTATTACTGTCAGCAGGCATCCAGTT |
| | | TCCCTTTCACTTTTGGCGGAGGGACCAAGGTTGAGATCAAA |
| 333 | BIIB-9-1270_VL | EIVLTQSPATLSLSPGERATLSCRASQSVSSYLAWYQQKPGQAPRLLIYDASNRATGIPARFSGSGSGTD |
| | Amino Acid | FTLTISSLEPEDFAVYYCQQSADFPFTFGGGTKVEIK |
| | Sequence | |
| 334 | BIIB-9-1270_VL | GAAATTGTGTTGACACAGTCTCCAGCCACCCTGTCTTTGTCTCCAGGGGAAAGAGCCACCCTCTCCTGCA |
| | Nucleic Acid | GGGCCAGTCAGAGTGTTAGCAGCTACTTAGCCTGGTACCAACAGAAACCTGGCCAGGCTCCCAGGCTCCT |
| | Sequence | CATCTATGATGCATCCAACAGGGCCACTGGCATCCCAGCCAGGTTCAGTGGCAGTGGGTCTGGGACAGAC |
| | | TTCACTCTCACCATCAGCAGCCTAGAGCCTGAAGATTTTGCAGTTTATTACTGTCAGCAGTCCGCCGATT |
| | | TCCCTTTCACTTTTGGCGGAGGGACCAAGGTTGAGATCAAA |
| 335 | BIIB-9-1271_VL | EIVMTQSPATLSVSPGERATLSCRASQSVSSNLAWYQQKPGQAPRLLIYGASTRATGIPARFSGSGSGTD |
| | Amino Acid | FTLTISSLQPEDFATYYCQQGFSFPFTFGGGTKVEIK |
| | Sequence | |
| 336 | BIIB-9-1271_VL | GAAATAGTGATGACGCAGTCTCCAGCCACCCTGTCTGTGTCTCCAGGGGAAAGAGCCACCCTCTCCTGCA |
| | Nucleic Acid | GGGCCAGTCAGAGTGTTAGCAGCAACTTAGCCTGGTACCAGCAGAAACCTGGCCAGGCTCCCAGGCTCCT |
| | Sequence | CATCTATGGTGCATCCACCAGGGCCACTGGTATCCCAGCCAGGTTCAGTGGCAGTGGGTCTGGGACAGAT |
| | | TTCACTCTCACCATCAGCAGCCTGCAGCCTGAAGATTTTGCAACTTATTACTGTCAGCAGGGATTCAGTT |
| | | TCCCTTTCACTTTTGGCGGAGGGACCAAGGTTGAGATCAAA |
| 337 | BIIB-9-1272_VL | DIQMTQSPSSVSASVGDRVTITCRASQGISSWLAWYQQKPGKAPKLLIYAASSLQSGVPSRFSGSGSGTD |
| | Amino Acid | FTLTISSLQPEDFATYYCQQASSFPFTFGGGTKVEIK |
| | Sequence | |
| 338 | BIIB-9-1272_VL | GACATCCAGATGACCCAGTCTCCATCTTCCGTGTCTGCATCTGTAGGAGACAGAGTCACCATCACTTGTC |
| | Nucleic Acid | GGGCGAGTCAGGGTATTAGCAGCTGGTTAGCCTGGTATCAGCAGAAACCAGGGAAAGCCCCTAAGCTCCT |
| | Sequence | GATCTATGCTGCATCCAGTTTGCAAAGTGGGGTCCCATCAAGGTTCAGCGGCAGTGGATCTGGGACAGAT |
| | | TTCACTCTCACCATCAGCAGCCTGCAGCCTGAAGATTTTGCAACTTATTACTGTCAGCAGGCATCCAGTT |
| | | TCCCTTTCACTTTTGGCGGAGGGACCAAGGTTGAGATCAAA |
| 339 | BIIB-9-1273_VL | EIVLTQYPATLSLSPGERATLSCRASQSVSSYLAWYQQKPGQAPRLLIYDASNRATGIPARFSGSGSGTD |
| | Amino Acid | FTLTISSLEPEDFAVYYCQQSANFPFTFGGGTKVEIK |
| | Sequence | |
| 340 | BIIB-9-1273_VL | GAAATTGTGTTGACACAGTATCCAGCCACCCTGTCTTTGTCTCCAGGGGAAAGAGCCACCCTCTCCTGCA |
| | Nucleic Acid | GGGCCAGTCAGAGTGTTAGCAGCTACTTAGCCTGGTACCAACAGAAACCTGGCCAGGCTCCCAGGCTCCT |
| | Sequence | CATCTATGATGCATCCAACAGGGCCACTGGCATCCCAGCCAGGTTCAGTGGCAGTGGGTCTGGGACAGAC |
| | | TTCACTCTCACCATCAGCAGCCTAGAGCCTGAAGATTTTGCAGTTTATTACTGTCAGCAGTCCGCCAATT |
| | | TCCCTTTCACTTTTGGCGGAGGGACCAAGGTTGAGATCAAA |
| 341 | BIIB-9-1274_VL | DIQMTQSPSSVSASVGDRVTITCRASQGISSWLAWYQQKPGKAPKLLIYAASSLQSGVPSRFSGSGSGTD |
| | Amino Acid | FTLTISSLQPEDFATYYCQQANSFPFTFGGGTKVEIK |
| | Sequence | |
| 342 | BIIB-9-1274_VL | GACATCCAGATGACCCAGTCTCCATCTTCCGTGTCTGCATCTGTAGGAGACAGAGTCACCATCACTTGTC |
| | Nucleic Acid | GGGCGAGTCAGGGTATTAGCAGCTGGTTAGCCTGGTATCAGCAGAAACCAGGGAAAGCCCCTAAGCTCCT |
| | Sequence | GATCTATGCTGCATCCAGTTTGCAAAGTGGGGTCCCATCAAGGTTCAGCGGCAGTGGATCTGGGACAGAT |
| | | TTCACTCTCACCATCAGCAGCCTGCAGCCTGAAGATTTTGCAACTTATTACTGTCAGCAGGCAAATTCCT |
| | | TCCCTTTCACTTTTGGCGGAGGGACCAAGGTTGAGATCAAA |
| 343 | BIIB-9-1275_VL | DIQMTQSPSSVSASVGDRVTITCRASQGISGWLAWYQQKPGKAPKLLIYAASSLQSGVPSRFSGSGSGTD |
| | Amino Acid | FTLTISSLQPEDFATYYCQQANSLPITFGGGTKVEIK |
| | Sequence | |
| 344 | BIIB-9-1275_VL | GACATCCAGATGACCCAGTCTCCATCTTCCGTGTCTGCATCTGTAGGAGACAGAGTCACCATCACTTGTC |
| | Nucleic Acid | GGGCGAGTCAGGGTATTAGCGGCTGGTTAGCCTGGTATCAGCAGAAACCAGGGAAAGCCCCTAAGCTCCT |
| | Sequence | GATCTATGCTGCATCCAGTTTGCAAAGTGGGGTCCCATCAAGGTTCAGCGGCAGTGGATCTGGGACAGAT |
| | | TTCACTCTCACCATCAGCAGCCTGCAGCCTGAAGATTTTGCAACTTATTACTGTCAGCAGGCAAATTCCC |
| | | TCCCTATCACTTTTGGCGGAGGGACCAAGGTTGAGATCAAA |
| 345 | BIIB-9-1276_VL | DIQMTQSPSSVSASVGDRVTITCRASQGISSWLAWYQQKPGKAPKLLIYAASSLQSGVPSRFSGSGSGTD |
| | Amino Acid | FTLTISSLQPEDFATYYCQQGNSFPITFGGGTKVEIK |
| | Sequence | |
| 346 | BIIB-9-1276_VL | GACATCCAGATGACCCAGTCTCCATCTTCCGTGTCTGCATCTGTAGGAGACAGAGTCACCATCACTTGTC |
| | Nucleic Acid | GGGCGAGTCAGGGTATTAGCAGCTGGTTAGCCTGGTATCAGCAGAAACCAGGGAAAGCCCCTAAGCTCCT |
| | Sequence | GATCTATGCTGCATCCAGTTTGCAAAGTGGGGTCCCATCAAGGTTCAGCGGCAGTGGATCTGGGACAGAT |
| | | TTCACTCTCACCATCAGCAGCCTGCAGCCTGAAGATTTTGCAACTTATTACTGTCAGCAGGGAAATAGTT |
| | | TCCCTATCACTTTTGGCGGAGGGACCAAGGTTGAGATCAAA |
| 347 | BIIB-9-1277_VL | EIVMTQSPATLSVSPGERATLSCRASQSVSSYLAWYQQKPGQAPRLLIYDASNRATGIPARFSGSGSGTD |
| | Amino Acid | FTLTISSLEPEDLAVYYCQQSANWPPTFGGGTKVEIK |
| | Sequence | |
| 348 | BIIB-9-1277_VL | GAAATAGTGATGACGCAGTCTCCAGCCACCCTGTCTGTGTCTCCAGGGGAAAGAGCCACCCTCTCCTGCA |
| | Nucleic Acid | GGGCCAGTCAGAGTGTTAGCAGCTACTTAGCCTGGTACCAACAGAAACCTGGCCAGGCTCCCAGGCTCCT |
| | Sequence | CATCTATGATGCATCCAACAGGGCCACTGGCATCCCAGCCAGGTTCAGTGGCAGTGGGTCTGGGACAGAC |
| | | TTCACTCTCACCATCAGCAGCCTAGAGCCTGAAGATCTTGCAGTTTATTACTGTCAGCAGTCCGCCAATT |
| | | GGCCTCCTACTTTTGGCGGAGGGACCAAGGTTGAGATCAAA |
| 349 | BIIB-9-1278_VL | EIVMTQSPATLSVSPGERATLSCRASQSVSSNLAWYQQKPGQAPRLLIYGASTRATGIPARFSGSGSGTE |
| | Amino Acid | FTLTISSLQSEDFAVYYCQQHANFPPTFGGGTKVEIK |
| | Sequence | |
| 350 | BIIB-9-1278_VL | GAAATAGTGATGACGCAGTCTCCAGCCACCCTGTCTGTGTCTCCAGGGGAAAGAGCCACCCTCTCCTGCA |
| | Nucleic Acid | GGGCCAGTCAGAGTGTTAGCAGCAACTTAGCCTGGTACCAGCAGAAACCTGGCCAGGCTCCCAGGCTCCT |
| | Sequence | CATCTATGGTGCATCCACCAGGGCCACTGGTATCCCAGCCAGGTTCAGTGGCAGTGGGTCTGGGACAGAG |
| | | TTCACTCTCACCATCAGCAGCCTGCAGTCTGAAGATTTTGCAGTTTATTACTGTCAGCAGCACGCCAATT |
| | | TTCCTCCTACTTTTGGCGGAGGGACCAAGGTTGAGATCAAA |
| 351 | BIIB-9-1279_VL | DIQMTQSPSSVSASVGDRVTITCRASQGISSWLAWYQQKPGKAPKLLIYAASSLQSGVPSRFSGSGSGTD |
| | Amino Acid | FTLTISSLQPEDFATYYCQQASSFPPTFGGGTKVEIK |
| | Sequence | |
| 352 | BIIB-9-1279_VL | GACATCCAGATGACCCAGTCTCCATCTTCCGTGTCTGCATCTGTAGGAGACAGAGTCACCATCACTTGTC |
| | Nucleic Acid | GGGCGAGTCAGGGTATTAGCAGCTGGTTAGCCTGGTATCAGCAGAAACCAGGGAAAGCCCCTAAGCTCCT |
| | Sequence | GATCTATGCTGCATCCAGTTTGCAAAGTGGGGTCCCATCAAGGTTCAGCGGCAGTGGATCTGGGACAGAT |
| | | TTCACTCTCACCATCAGCAGCCTGCAGCCTGAAGATTTTGCAACTTATTACTGTCAGCAGGCATCCAGTT |
| | | TCCCTCCTACTTTTGGCGGAGGGACCAAGGTTGAGATCAAA |
| 353 | BIIB-9-1280_VL | DIQMTQSPSSLSASVGDRVTITCRASQSISSYLNWYQQKPGKAPKLLIYAASSLQSGVPSRFSGSGSGTD |
| | Amino Acid | FTLTISSLQPEDFATYYCQQAYSLPITFGGGTKVEIK |
| | Sequence | |
| 354 | BIIB-9-1280_VL | GACATCCAGATGACCCAGTCTCCATCCTCCCTGTCTGCATCTGTAGGAGACAGAGTCACCATCACTTGCC |
| | Nucleic Acid | GGGCAAGTCAGAGCATTAGCAGCTATTTAAATTGGTATCAGCAGAAACCAGGGAAAGCCCCTAAGCTCCT |
| | Sequence | GATCTATGCTGCATCCAGTTTGCAAAGTGGGGTCCCATCAAGGTTCAGTGGCAGTGGATCTGGGACAGAT |
| | | TTCACTCTCACCATCAGCAGTCTGCAACCTGAAGATTTTGCAACTTACTACTGTCAGCAAGCATACAGTC |
| | | TCCCTATCACTTTTGGCGGAGGGACCAAGGTTGAGATCAAA |
| 355 | BIIB-9-1281_VL | DIQMTQSPSTLSASVGDRVTITCRASQSISSWLAWYQQKPGKAPKLLIYKASSLESGVPSRFSGSGSGTD |
| | Amino Acid | FTLTISSLQPEDFATYYCQQAISLPITFGGGTKVEIK |
| | Sequence | |
| 356 | BIIB-9-1281_VL | GACATCCAGATGACCCAGTCTCCTTCCACCCTGTCTGCATCTGTAGGAGACAGAGTCACCATCACTTGCC |
| | Nucleic Acid | GGGCCAGTCAGAGTATTAGTAGCTGGTTGGCCTGGTATCAGCAGAAACCAGGGAAAGCCCCTAAGCTCCT |
| | Sequence | GATCTATAAAGCCTCCAGTTTGGAAAGTGGGGTCCCATCAAGGTTCAGCGGCAGTGGATCTGGGACAGAT |
| | | TTCACTCTCACCATCAGCAGCCTGCAGCCTGAAGATTTTGCAACTTATTACTGTCAGCAGGCAATCAGTC |
| | | TCCCTATCACTTTTGGCGGAGGGACCAAGGTTGAGATCAAA |
| 357 | BIIB-9-1282_VL | EIVMTQSPATLSVSPGERATLSCRASQSVSSNLAWYQQKPGQAPRLLIYGASTRATGIPARFSGSGSGTE |
| | Amino Acid | FTLTISSLQSEDFAVYYCQQHNHLPITFGGGTKVEIK |
| | Sequence | |
| 358 | BIIB-9-1282_VL | GAAATAGTGATGACGCAGTCTCCAGCCACCCTGTCTGTGTCTCCAGGGGAAAGAGCCACCCTCTCCTGCA |
| | Nucleic Acid | GGGCCAGTCAGAGTGTTAGCAGCAACTTAGCCTGGTACCAGCAGAAACCTGGCCAGGCTCCCAGGCTCCT |
| | Sequence | CATCTATGGTGCATCCACCAGGGCCACTGGTATCCCAGCCAGGTTCAGTGGCAGTGGGTCTGGGACAGAG |
| | | TTCACTCTCACCATCAGCAGCCTGCAGTCTGAAGATTTTGCAGTTTATTACTGTCAGCAGCACAATCACC |
| | | TCCCTATCACTTTTGGCGGAGGGACCAAGGTTGAGATCAAA |
| 359 | BIIB-9-1283_VL | DIQMTQSPSSVSASVGDRVTITCRASQGISSWLAWYQQKPGKAPKLLIYAASSLQSGVPSRFSGSGSGTD |
| | Amino Acid | FTLTISSLQPEDFATYYCQQASSFPPTFGGGTKVEIK |
| | Sequence | |
| 360 | BIIB-9-1283_VL | GACATCCAGATGACCCAGTCTCCATCTTCCGTGTCTGCATCTGTAGGAGACAGAGTCACCATCACTTGTC |
| | Nucleic Acid | GGGCGAGTCAGGGTATTAGCAGCTGGTTAGCCTGGTATCAGCAGAAACCAGGGAAAGCCCCTAAGCTCCT |
| | Sequence | GATCTATGCTGCATCCAGTTTGCAAAGTGGGGTCCCATCAAGGTTCAGCGGCAGTGGATCTGGGACAGAT |
| | | TTCACTCTCACCATCAGCAGCCTGCAGCCTGAAGATTTTGCAACTTATTACTGTCAGCAGGCATCCAGTT |
| | | TCCCTCCTACTTTTGGCGGAGGGACCAAGGTTGAGATCAAA |
| 361 | BIIB-9-1284_VL | EIVLTQSPATLSVSPGERATLSCRASQSVGSNLAWYQQKPGQAPRLLIYGASTRATGIPARFSGSGSGTE |
| | Amino Acid | FTLTISSLQSEDFAVYYCQQHNHLPITFGGGTKVEIK |
| | Sequence | |
| 362 | BIIB-9-1284_VL | GAAATAGTGTTGACGCAGTCTCCAGCCACCCTGTCTGTGTCTCCAGGGGAAAGAGCCACCCTCTCCTGCA |
| | Nucleic Acid | GGGCCAGTCAGAGTGTTGGCAGCAACTTAGCCTGGTACCAGCAGAAACCTGGCCAGGCTCCCAGGCTCCT |
| | Sequence | CATCTATGGTGCATCCACCAGGGCCACTGGTATCCCAGCCAGGTTCAGTGGCAGTGGGTCTGGGACAGAG |
| | | TTCACTCTCACTATCAGCAGCCTGCAGTCTGAAGATTTTGCAGTTTATTACTGTCAGCAGCACAATCACC |
| | | TCCCTATCACTTTTGGCGGAGGGACCAAGGTTGAGATCAAA |
| 363 | BIIB-9-1285_VL | EIVMTQSPATLSVSPGERATLSCRASQSVSSNLAWYQQKPGQAPRLLIYGASTRATGIPARFSGSGSGTE |
| | Amino Acid | FTLTISSLQSEDFAVYYCQQASNFPPTFGGGTKVEIK |
| | Sequence | |
| 364 | BIIB-9-1285_VL | GAAATAGTGATGACGCAGTCTCCAGCCACCCTGTCTGTGTCTCCAGGGGAAAGAGCCACCCTCTCCTGCA |
| | Nucleic Acid | GGGCCAGTCAGAGTGTTAGCAGCAACTTAGCCTGGTACCAGCAGAAACCTGGCCAGGCTCCCAGGCTCCT |
| | Sequence | CATCTATGGTGCATCCACCAGGGCCACTGGTATCCCAGCCAGGTTCAGTGGCAGTGGGTCTGGGACAGAG |
| | | TTCACTCTCACCATCAGCAGCCTGCAGTCTGAAGATTTTGCAGTTTATTACTGTCAGCAGGCCTCCAATT |
| | | TCCCTCCTACTTTTGGCGGAGGGACCAAGGTTGAGATCAAA |
| 365 | BIIB-9-1286_VL | DIQMTQSPSSVSASVGDRVTITCRASQGISSWLAWYQQKPGKAPKLLIYAASSLQSGVPSRFSGSGSGTD |
| | Amino Acid | FTLTISSLQPEDFVTYYCQQASSFPPTFGGGTKVEIK |
| | Sequence | |
| 366 | BIIB-9-1286_VL | GACATCCAGATGACCCAGTCTCCATCTTCCGTGTCTGCATCTGTAGGAGACAGAGTCACCATCACTTGTC |
| | Nucleic Acid | GGGCGAGTCAGGGTATTAGCAGCTGGTTAGCCTGGTATCAGCAGAAACCAGGGAAAGCCCCTAAGCTCCT |
| | Sequence | GATCTATGCTGCATCCAGTTTGCAAAGTGGGGTCCCATCAAGGTTCAGCGGCAGTGGATCTGGGACAGAT |
| | | TTCACTCTCACCATCAGCAGCCTGCAGCCTGAAGATTTTGTAACTTATTACTGTCAGCAGGCATCCAGTT |
| | | TCCCTCCTACTTTTGGCGGAGGGACCAAGGTTGAGATCAAA |
| 367 | BIIB-9-1287_VL | EIVLTQSPGTLSLSPGERATLSCRASQSVSSSYLAWYQQKPGQAPRLLIYGASSRATGIPDRFSGSGSGT |
| | Amino Acid | DFTLTISRLEPEDFAVYYCQQYHLHPTFGGGTKVEIK |
| | Sequence | |
| 368 | BIIB-9-1287_VL | GAAATTGTGTTGACGCAGTCTCCAGGCACCCTGTCTTTGTCTCCAGGGGAAAGAGCCACCCTCTCCTGCA |
| | Nucleic Acid | GGGCCAGTCAGAGTGTTAGCAGCAGCTACTTAGCCTGGTACCAGCAGAAACCTGGCCAGGCTCCCAGGCT |
| | Sequence | CCTCATCTATGGTGCATCCAGCAGGGCCACTGGCATCCCAGACAGGTTCAGTGGCAGTGGGTCTGGGACA |
| | | GACTTCACTCTCACCATCAGCAGACTGGAGCCTGAAGATTTTGCAGTGTATTACTGTCAGCAGTACCACC |
| | | TCCACCCTACTTTTGGCGGAGGGACCAAGGTTGAGATCAAA |

Class IV Antibodies _VL Sequences

| | | |
|---|---|---|
| 369 | BIIB-9-397_VL | DIQMTQSPSSLSASVGDRVTITCQASQDISNYLNWYQQKPGKAPKLLIYDASNLETGVPSRFSGSGSGTD |
| | Amino Acid | FTFTISSLQPEDIATYYCQQSDDHPPTFGGGTKVEIK |
| | Sequence | |
| 370 | BIIB-9-397_VL | GACATCCAGATGACCCAGTCTCCATCCTCCCTGTCTGCATCTGTAGGAGACAGAGTCACCATCACTTGCC |
| | Nucleic Acid | AGGCGAGTCAGGACATTAGCAACTATTTAAATTGGTATCAGCAGAAACCAGGGAAAGCCCCTAAGCTCCT |
| | Sequence | GATCTACGATGCATCCAATTTGGAAACAGGGGTCCCATCAAGGTTCAGTGGAAGTGGATCTGGGACAGAT |
| | | TTTACTTTCACCATCAGCAGCCTGCAGCCTGAAGATATTGCAACATATTACTGTCAGCAGTCCGATGACC |
| | | ACCCTCCTACTTTTGGCGGAGGGACCAAGGTTGAGATCAAA |
| 371 | BIIB-9-578_VL | DIQMTQSPSSVSASVGDRVTITCRASQGIDSWLAWYQQKPGKAPKLLIYAASSLQSGVPSRFSGSGSGTD |
| | Amino Acid | FTLTISSLQPEDFATYYCQQANFLPFTFGGGTKVEIK |
| | Sequence | |
| 372 | BIIB-9-578_VL | GACATCCAGATGACCCAGTCTCCATCTTCCGTGTCTGCATCTGTAGGAGACAGAGTCACCATCACTTGTC |
| | Nucleic Acid | GGGCGAGTCAGGGTATTGACAGCTGGTTAGCCTGGTATCAGCAGAAACCAGGGAAAGCCCCTAAGCTCCT |
| | Sequence | GATCTATGCTGCATCCAGTTTGCAAAGTGGGGTCCCATCAAGGTTCAGCGGCAGTGGATCTGGGACAGAT |
| | | TTCACTCTCACCATCAGCAGCCTGCAGCCTGAAGATTTTGCAACTTATTACTGTCAGCAGGCAAATTTCC |
| | | TCCCTTTCACTTTTGGCGGAGGGACCAAGGTTGAGATCAAA |
| 373 | BIIB-9-631_VL | DIQMTQSPSSVSASVGDRVTITCRASQGISRWLAWYQQKPGKAPKLLIYAASSLQSGVPSRFSGSGSGTD |
| | Amino Acid | FTLTISSLQPEDFATYYCQQRTSFPLTFGGGTKVEIK |
| | Sequence | |
| 374 | BIIB-9-631_VL | GACATCCAGATGACCCAGTCTCCATCTTCCGTGTCTGCATCTGTAGGAGACAGAGTCACCATCACTTGTC |
| | Nucleic Acid | GGGCGAGTCAGGGTATTAGCAGGTGGTTAGCCTGGTATCAGCAGAAACCAGGGAAAGCCCCTAAGCTCCT |
| | Sequence | GATCTATGCTGCATCCAGTTTGCAAAGTGGGGTCCCATCAAGGTTCAGCGGCAGTGGATCTGGGACAGAT |
| | | TTCACTCTCACCATCAGCAGCCTGCAGCCTGAAGATTTTGCAACTTATTACTGTCAGCAGAGAACCAGTT |
| | | TCCCTCTCACTTTTGGCGGAGGGACCAAGGTTGAGATCAAA |
| 375 | BIIB-9-612_VL | EIVLTQSPATLSLSPGERATLSCRASQSVSRYLAWYQQKPGQAPRLLIYDASNRATGIPARFSGSGSGTD |
| | Amino Acid | FTLTISSLEPEDFAVYYCQQSSLFPLTFGGGTKVEIK |
| | Sequence | |
| 376 | BIIB-9-612_VL | GAAATTGTGTTGACACAGTCTCCAGCCACCCTGTCTTTGTCTCCAGGGGAAAGAGCCACCCTCTCCTGCA |
| | Nucleic Acid | GGGCCAGTCAGAGTGTTAGCAGGTACTTAGCCTGGTACCAACAGAAACCTGGCCAGGCTCCCAGGCTCCT |
| | Sequence | CATCTATGATGCATCCAACAGGGCCACTGGCATCCCAGCCAGGTTCAGTGGCAGTGGGTCTGGGACAGAC |
| | | TTCACTCTCACCATCAGCAGCCTAGAGCCTGAAGATTTTGCAGTTTATTACTGTCAGCAGTCCAGTCTCT |
| | | TCCCTCTCACTTTTGGCGGAGGGACCAAGGTTGAGATCAAA |

Class V Antibody - VH Sequences

| | | |
|---|---|---|
| 377 | BIIB-12-891_VH | QVQLVQSGAEVKKPGASVKVSCKASGYTFTSYYIHWVRQAPGQGLEWMGIINPSGGSTSYAQKFQGRVTM |
| | Amino Acid | TRDTSTSTVYMELSSLRSEDTAVYYCARASIYRGLGAFDIWGQGTMVTVSS |
| | Sequence | |
| 378 | BIIB-12-891_VH | CAGGTGCAGCTGGTGCAGTCTGGGGCTGAGGTGAAGAAGCCTGGGGCCTCAGTGAAGGTTTCCTGCAAGG |
| | Nucleic Acid | CATCTGGATACACCTTCACCAGCTACTATATCCACTGGGTGCGACAGGCCCCTGGACAAGGGCTTGAGTG |
| | Sequence | GATGGGAATAATCAACCCTAGTGGTGGTAGCACAAGCTACGCACAGAAGTTCCAGGGCAGAGTCACCATG |
| | | ACCAGGGACACGTCCACGAGCACAGTCTACATGGAGCTGAGCAGCCTGAGATCTGAGGACACGGCGGTGT |
| | | ACTACTGCGCTAGGGCATCTATATACCGAGGTCTCGGAGCCTTCGACATATGGGGTCAGGGTACAATGGT |
| | | CACCGTCTCCTCA |
| 379 | BIIB-12-892_VH | QVQLVQSGAEVKKPGASVKVSCKASGYTFTSYYMHWVRQAPGQGLEWMGIINPSGGSTSYAQKFQGRVTM |
| | Amino Acid | TRDTSTSTVYMELSSLRSEDTAVYYCARGLGRRTPTAFDIWGQGTMVTVSS |
| | Sequence | |
| 380 | BIIB-12-892_VH | CAGGTGCAGCTGGTGCAGTCTGGGGCTGAGGTGAAGAAGCCTGGGGCCTCAGTGAAGGTTTCCTGCAAGG |
| | Nucleic Acid | CATCTGGATACACCTTCACCAGCTACTATATGCACTGGGTGCGACAGGCCCCTGGACAAGGGCTTGAGTG |
| | Sequence | GATGGGAATAATCAACCCTAGTGGTGGTAGCACAAGCTACGCACAGAAGTTCCAGGGCAGAGTCACCATG |
| | | ACCAGGGACACGTCCACGAGCACAGTCTACATGGAGCTGAGCAGCCTGAGATCTGAGGACACGGCGGTGT |
| | | ACTACTGCGCCAGAGGACTAGGAAGAAGAACTCCAACCGCCTTTGATATTTGGGGTCAGGGTACAATGGT |
| | | CACCGTCTCCTCA |
| 381 | BIIB-12-893_VH | QVQLVQSGAEVKKPGASVKVSCKASGYTFTSYYMVWVRQAPGQGLEWMGIINPSGGSTSYAQKFQGRVTM |
| | Amino Acid | TRDTSTSTVYMELSSLRSEDTAVYYCARDPGRRQYSFYGMDVWGQGTTVTVSS |
| | Sequence | |
| 382 | BIIB-12-893_VH | CAGGTGCAGCTGGTGCAGTCTGGGGCTGAGGTGAAGAAGCCTGGGGCCTCAGTGAAGGTTTCCTGCAAGG |
| | Nucleic Acid | CATCTGGATACACCTTCACCAGCTACTATATGGTCTGGGTGCGACAGGCCCCTGGACAAGGGCTTGAGTG |
| | Sequence | GATGGGAATAATCAACCCTAGTGGTGGTAGCACAAGCTACGCACAGAAGTTCCAGGGCAGAGTCACCATG |
| | | ACCAGGGACACGTCCACGAGCACAGTCTACATGGAGCTGAGCAGCCTGAGATCTGAGGACACGGCGGTGT |
| | | ACTACTGCGCCAGAGATCCAGGAAGAAGGCAATACTCTTTCTACGGTATGGATGTCTGGGGCCAGGGAAC |
| | | AACTGTCACCGTCTCCTCA |
| 383 | BIIB-12-895_VH | QVQLVQSGAEVKKPGASVKVSCKASGYTFTSYYMHWVRQAPGQGLEWMGIINPSGGSTSYAQKFQGRVTM |
| | Amino Acid | TRDTSTSTVYMELSSLRSEDTAVYYCARGGGYKSRGIDYWGQGTLVTVSS |
| | Sequence | |
| 384 | BIIB-12-895_VH | CAGGTGCAGCTGGTGCAGTCTGGGGCTGAGGTGAAGAAGCCTGGGGCCTCAGTGAAGGTTTCCTGCAAGG |
| | Nucleic Acid | CATCTGGATACACCTTCACCAGCTACTATATGCACTGGGTGCGACAGGCCCCTGGACAAGGGCTTGAGTG |
| | Sequence | GATGGGAATAATCAACCCTAGTGGTGGTAGCACAAGCTACGCACAGAAGTTCCAGGGCAGAGTCACCATG |
| | | ACCAGGGACACGTCCACGAGCACAGTCTACATGGAGCTGAGCAGCCTGAGATCTGAGGACACGGCGGTGT |
| | | ACTACTGCGCCAGAGGTGGAGGATACAAATCTAGAGGCATTGACTACTGGGGACAGGGTACATTGGTCAC |
| | | CGTCTCCTCA |
| 385 | BIIB-12-896_VH | QVQLVQSGAEVKKPGASVKVSCKASGYTFTSYYMHWVRQAPGQGLEWMGIINPSGGSTSYAQKFQGRVTM |
| | Amino Acid | TRDTSTSTVYMELSSLRSEDTAVYYCARGLGQQRRGFDIWGQGTLVTVSS |
| | Sequence | |
| 386 | BIIB-12-896_VH | CAGGTGCAGCTGGTGCAGTCTGGGGCTGAGGTGAAGAAGCCTGGGGCCTCAGTGAAGGTTTCCTGCAAGG |
| | Nucleic Acid | CATCTGGATACACCTTCACCAGCTACTATATGCACTGGGTGCGACAGGCCCCTGGACAAGGGCTTGAGTG |
| | Sequence | GATGGGAATAATCAACCCTAGTGGTGGTAGCACAAGCTACGCACAGAAGTTCCAGGGCAGAGTCACCATG |
| | | ACCAGGGACACGTCCACGAGCACAGTCTACATGGAGCTGAGCAGCCTGAGATCTGAGGACACGGCGGTGT |
| | | ACTACTGCGCCAGAGGACTAGGACAGCAGCGGCGTGGCTTCGACATATGGGGTCAGGGTACATTGGTCAC |
| | | CGTCTCCTCA |
| 387 | BIIB-12-897_VH | QLQLQESGPGLVKPSETLSLTCTVSGGSISSSSYYWGWIRQPPGKGLEWIGSIYYSGSTYYNPSLKSRVT |
| | Amino Acid | ISVDTSKNQFSLKLSSVTAADTAVYYCAREGRTYYGGWFDPWGQGTLVTVSS |
| | Sequence | |
| 388 | BIIB-12-897_VH | CAGCTGCAGCTGCAGGAGTCGGGCCCAGGACTGGTGAAGCCTTCGGAGACCCTGTCCCTCACCTGCACTG |
| | Nucleic Acid | TCTCTGGTGGCTCCATCAGCAGTAGTAGTTACTACTGGGGCTGGATCCGCCAGCCCCCAGGGAAGGGGCT |
| | Sequence | GGAGTGGATTGGGAGTATCTATTATAGTGGGAGCACCTACTACAACCCGTCCCTCAAGAGTCGAGTCACC |
| | | ATATCCGTAGACACGTCCAAGAACCAGTTCTCCCTGAAGCTGAGTTCTGTGACCGCCGCAGACACGGCGG |
| | | TGTACTACTGCGCCAGAGAAGGGAGAACATACTACGGCGGTTGGTTCGATCCCTGGGGACAGGGTACATT |
| | | GGTCACCGTCTCCTCA |
| 389 | BIIB-12-898_VH | QVQLVQSGAEVKKPGASVKVSCKASGYTFTSYYMHWVRQAPGQGLEWMGIINPSGGSTTYAQKFQGRVTM |
| | Amino Acid | TRDTSTSTVYMELSSLRSEDTAVYYCARGDRMLRAFDPWGQGTLVTVSS |
| | Sequence | |
| 390 | BIIB-12-898_VH | CAGGTGCAGCTGGTGCAGTCTGGGGCTGAGGTGAAGAAGCCTGGGGCCTCAGTGAAGGTTTCCTGCAAGG |
| | Nucleic Acid | CATCTGGATACACCTTCACCAGCTACTATATGCACTGGGTGCGACAGGCCCCTGGACAAGGGCTTGAGTG |
| | Sequence | GATGGGAATAATCAACCCTAGTGGTGGTAGCACAACCTACGCACAGAAGTTCCAGGGCAGAGTCACCATG |
| | | ACCAGGGACACGTCCACGAGCACAGTCTACATGGAGCTGAGCAGCCTGAGATCTGAGGACACGGCGGTGT |
| | | ACTACTGCGCCAGAGGGGACAGGATGTTAAGAGCATTCGACCCATGGGGACAGGGTACATTGGTCACCGT |
| | | CTCCTCA |
| 391 | BIIB-12-899_VH | QVQLVQSGAEVKKPGASVKVSCKASGYTFTSYYMHWVRQAPGQGLEWMGIINPSGGSTSYAQKFQGRVTM |
| | Amino Acid | TRDTSTSTVYMELSSLRSEDTAVYYCARGPRTSSPLYFDLWGRGTLVTVSS |
| | Sequence | |
| 392 | BIIB-12-899_VH | CAGGTGCAGCTGGTGCAGTCTGGGGCTGAGGTGAAGAAGCCTGGGGCCTCAGTGAAGGTTTCCTGCAAGG |
| | Nucleic Acid | CATCTGGATACACCTTCACCAGCTACTATATGCACTGGGTGCGACAGGCCCCTGGACAAGGGCTTGAGTG |
| | Sequence | GATGGGAATAATCAACCCTAGTGGTGGTAGCACAAGCTACGCACAGAAGTTCCAGGGCAGAGTCACCATG |
| | | ACCAGGGACACGTCCACGAGCACAGTCTACATGGAGCTGAGCAGCCTGAGATCTGAGGACACGGCGGTGT |
| | | ACTACTGCGCCAGAGGGCCTAGAACATCATCACCTCTATACTTCGACCTATGGGGGAGAGGTACCTTGGT |
| | | CACCGTCTCCTCA |
| 393 | BIIB-12-900_VH | QVQLVQSGAEVKKPGASVKVSCKASGYTFTSYYMHWVRQAPGQGLEWMGIINPGGGSTSYAQKFQGRVTM |
| | Amino Acid | TRDTSTSTVYMELSSLRSEDTAVYYCARSGGMYDRELGMDVWGQGTTVTVSS |
| | Sequence | |
| 394 | BIIB-12-900_VH | CAGGTGCAGCTGGTGCAGTCTGGGGCTGAGGTGAAGAAGCCTGGGGCCTCAGTGAAGGTTTCCTGCAAGG |
| | Nucleic Acid | CATCTGGATACACCTTCACCAGCTACTATATGCACTGGGTGCGACAGGCCCCTGGACAAGGGCTTGAGTG |
| | Sequence | GATGGGAATAATCAACCCTGGTGGTGGTAGCACAAGCTACGCACAGAAGTTCCAGGGCAGAGTCACCATG |
| | | ACCAGGGACACGTCCACGAGCACAGTCTACATGGAGCTGAGCAGCCTGAGATCTGAGGACACGGCGGTGT |
| | | ACTACTGCGCCAGATCAGGCGGAATGTACGACCGAGAGCTCGGAATGGACGTATGGGGCCAGGGAACAAC |
| | | TGTCACCGTCTCCTCA |
| 395 | BIIB-12-901_VH | QVQLVQSGAEVKKPGASVKVSCKASGYTFTSYYMSWVRQAPGQGLEWMGIINPSGGSTSYAQKFQGRVTM |
| | Amino Acid | TRDTSTSTVYMELSSLRSEDTAVYYCARSRPRRPSPYGMDVWGQGTTVTVSS |
| | Sequence | |
| 396 | BIIB-12-901_VH | CAGGTGCAGCTGGTGCAGTCTGGGGCTGAGGTGAAGAAGCCTGGGGCCTCAGTGAAGGTTTCCTGCAAGG |
| | Nucleic Acid | CATCTGGATACACCTTCACCAGCTACTATATGTCATGGGTGCGACAGGCCCCTGGACAAGGGCTTGAGTG |
| | Sequence | GATGGGAATAATCAACCCTAGTGGTGGTAGCACAAGCTACGCACAGAAGTTCCAGGGCAGAGTCACCATG |
| | | ACCAGGGACACGTCCACGAGCACAGTCTACATGGAGCTGAGCAGCCTGAGATCTGAGGACACGGCGGTGT |
| | | ACTACTGCGCTAGATCAAGACCAAGACGACCAAGCCCATACGGAATGGACGTATGGGGCCAGGGAACAAC |
| | | TGTCACCGTCTCCTCA |
| 397 | BIIB-12-902_VH | QVQLVQSGAEVKKPGASVKVSCKASGYTFTSYYMHWVRQAPGQGLEWMGIINPGGGSTSYAQKFQGRVTM |
| | Amino Acid | TRDTSTSTVYMELSSLRSEDTAVYYCARGGPRRAYSWYFDYWGQGTLVTVSS |
| | Sequence | |
| 398 | BIIB-12-902_VH | CAGGTGCAGCTGGTGCAGTCTGGGGCTGAGGTGAAGAAGCCTGGGGCCTCAGTGAAGGTTTCCTGCAAGG |
| | Nucleic Acid | CATCTGGATACACCTTCACCAGCTACTATATGCACTGGGTGCGACAGGCCCCTGGACAAGGGCTTGAGTG |
| | Sequence | GATGGGAATAATCAACCCTGGTGGTGGTAGCACAAGCTACGCACAGAAGTTCCAGGGCAGAGTCACCATG |
| | | ACCAGGGACACGTCCACGAGCACAGTCTACATGGAGCTGAGCAGCCTGAGATCTGAGGACACGGCGGTGT |
| | | ACTACTGCGCCAGAGGTGGGCCTAGAAGGGCCTACAGCTGGTACTTTGACTACTGGGGACAGGGTACATT |
| | | GGTCACCGTCTCCTCA |
| 399 | BIIB-12-903_VH | QVQLVQSGAEVKKPGASVKVSCKASGYTFTSYYMHWVRQAPGQGLEWMGIINPSGGSTSYAQKFQGRVTM |
| | Amino Acid | TRDTSTSTVYMELSSLRSEDTAVYYCARDLGYTAGAFGYWGQGTLVTVSS |
| | Sequence | |
| 400 | BIIB-12-903_VH | CAGGTGCAGCTGGTGCAGTCTGGGGCTGAGGTGAAGAAGCCTGGGGCCTCAGTGAAGGTTTCCTGCAAGG |
| | Nucleic Acid | CATCTGGATACACCTTCACCAGCTACTATATGCACTGGGTGCGACAGGCCCCTGGACAAGGGCTTGAGTG |
| | Sequence | GATGGGAATAATCAACCCTAGTGGTGGTAGCACAAGCTACGCACAGAAGTTCCAGGGCAGAGTCACCATG |
| | | ACCAGGGACACGTCCACGAGCACAGTCTACATGGAGCTGAGCAGCCTGAGATCTGAGGACACGGCGGTGT |
| | | ACTACTGCGCCAGAGACCTGGGATACACCGCAGGGGCTTTTGGCTACTGGGGACAGGGTACATTGGTCAC |
| | | CGTCTCCTCA |
| 401 | BIIB-12-904_VH | QVQLVESGGGVVQPGRSLRLSCAASGFTFSSYGMHWVRQAPGKGLEWVAVISYDGSNKYYADSVKGRFTI |
| | Amino Acid | SRDNSKNTLYLQMNSLRAEDTAVYYCARGSGRSGYHYWGQGTLVTVSS |
| | Sequence | |
| 402 | BIIB-12-904_VH | CAGGTGCAGCTGGTGGAGTCTGGGGGAGGCGTGGTCCAGCCTGGGAGGTCCCTGAGACTCTCCTGTGCAG |
| | Nucleic Acid | CGTCTGGATTCACCTTCAGTAGCTATGGCATGCACTGGGTCCGCCAGGCTCCAGGCAAGGGGCTGGAGTG |
| | Sequence | GGTGGCAGTTATATCGTATGATGGAAGTAATAAATACTATGCAGACTCCGTGAAGGGCCGATTCACCATC |
| | | TCCAGAGACAATTCCAAGAACACGCTGTATCTGCAAATGAACAGCCTGAGAGCCGAGGACACGGCGGTGT |
| | | ACTACTGCGCCAGAGGCTCTGGAAGATCCGGGTACCATTACTGGGGACAGGGTACATTGGTCACCGTCTC |
| | | CTCA |
| 403 | BIIB-12-905_VH | QVQLVESGGGVVQPGRSLRLSCAASGFTFSSYGMHWVRQAPGKGLEWVAVISYDGSNKYYADSVKGRFTI |
| | Amino Acid | SRDNSKNTLYLQMNSLRAEDTAVYYCAKGGTYLDTWGQGTLVTVSS |
| | Sequence | |
| 404 | BIIB-12-905_VH | CAGGTGCAGCTGGTGGAGTCTGGGGGAGGCGTGGTCCAGCCTGGGAGGTCCCTGAGACTCTCCTGTGCAG |
| | Nucleic Acid | CGTCTGGATTCACCTTCAGTAGCTATGGCATGCACTGGGTCCGCCAGGCTCCAGGCAAGGGGCTGGAGTG |
| | Sequence | GGTGGCAGTTATATCGTATGATGGAAGTAATAAATACTATGCAGACTCCGTGAAGGGCCGATTCACCATC |
| | | TCCAGAGACAATTCCAAGAACACGCTGTATCTGCAAATGAACAGCCTGAGAGCCGAGGACACGGCGGTGT |
| | | ACTACTGCGCCAAGGGCGGAACATACTTAGACACTTGGGGACAGGGTACATTGGTCACCGTCTCCTCA |
| 405 | BIIB-12-906_VH | QVQLVESGGGVVQPGRSLRLSCAASGFTFSSYGMHWVRQAPGKGLEWVAVISYDGSNKYYADSVKGRFTI |
| | Amino Acid | SRDNSKNTLYLQMNSLRAEDTAVYYCAKSSRHFDYWGRGTLVTVSS |
| | Sequence | |
| 406 | BIIB-12-906_VH | CAGGTGCAGCTGGTGGAGTCTGGGGGAGGCGTGGTCCAGCCTGGGAGGTCCCTGAGACTCTCCTGTGCAG |
| | Nucleic Acid | CGTCTGGATTCACCTTCAGTAGCTATGGCATGCACTGGGTCCGCCAGGCTCCAGGCAAGGGGCTGGAGTG |
| | Sequence | GGTGGCAGTTATATCGTATGATGGAAGTAATAAATACTATGCAGACTCCGTGAAGGGCCGATTCACCATC |
| | | TCCAGAGACAATTCCAAGAACACGCTGTATCTGCAAATGAACAGCCTGAGAGCCGAGGACACGGCGGTGT |
| | | ACTACTGCGCCAAGTCTAGTAGACATTTCGATTACTGGGGACGGGGTACATTGGTCACCGTCTCCTCA |
| 407 | BIIB-12-907_VH | QVQLQESGPGLVKPSETLSLTCAVSGYSISSGYYWAWIRQPPGKGLEWIGSIYHSGSTYYNPSLKSRVTI |
| | Amino Acid | SVDTSKNQFSLKLSSVTAADTAVYYCARESGMSGAAYWGQGTLVTVSS |
| | Sequence | |
| 408 | BIIB-12-907_VH | CAGGTGCAGCTGCAGGAGTCGGGCCCAGGACTGGTGAAGCCTTCGGAGACCCTGTCCCTCACCTGCGCTG |
| | Nucleic Acid | TCTCTGGTTACTCCATCAGCAGTGGTTACTACTGGGCTTGGATCCGGCAGCCCCCAGGGAAGGGGCTGGA |
| | Sequence | GTGGATTGGGAGTATCTATCATAGTGGGAGCACCTACTACAACCCGTCCCTCAAGAGTCGAGTCACCATA |
| | | TCAGTAGACACGTCCAAGAACCAGTTCTCCCTGAAGCTGAGTTCTGTGACCGCCGCAGACACGGCGGTGT |
| | | ACTACTGCGCCAGAGAGTCTGGAATGAGCGGAGCGGCTTACTGGGGACAGGGTACATTGGTCACCGTCTC |
| | | CTCA |
| 409 | BIIB-12-908_VH | QVQLVESGGGVVQPGRSLRLSCAASGFTFSSYGMHWVRQAPGKGLEWVAVISYDGSNKYYADSVKGRFTI |
| | Amino Acid | SRDNSKNTLYLQMNSLRAEDTAVYYCAKGPRGMDVWGQGTTVTVSS |
| | Sequence | |
| 410 | BIIB-12-908_VH | CAGGTGCAGCTGGTGGAGTCTGGGGGAGGCGTGGTCCAGCCTGGGAGGTCCCTGAGACTCTCCTGTGCAG |
| | Nucleic Acid | CGTCTGGATTCACCTTCAGTAGCTATGGCATGCACTGGGTCCGCCAGGCTCCAGGCAAGGGGCTGGAGTG |
| | Sequence | GGTGGCAGTTATATCGTATGATGGAAGTAATAAATACTATGCAGACTCCGTGAAGGGCCGATTCACCATC |
| | | TCCAGAGACAATTCCAAGAACACGCTGTATCTGCAAATGAACAGCCTGAGAGCCGAGGACACGGCGGTGT |
| | | ACTACTGCGCCAAGGGCCCCAGAGGAATGGACGTATGGGGCCAGGGAACAACTGTCACCGTCTCCTCA |
| 411 | BIIB-12-909_VH | QVQLVESGGGVVQPGRSLRLSCAASGFTFSSYGMHWVRQAPGKGLEWVAVISYDGSNKYYADSVKGRFTI |
| | Amino Acid | SRDNSKNTLYLQMNSLRAEDTAVYYCAKGKHRRRSFDIWGQGTMVTVSS |
| | Sequence | |
| 412 | BIIB-12-909_VH | CAGGTGCAGCTGGTGGAGTCTGGGGGAGGCGTGGTCCAGCCTGGGAGGTCCCTGAGACTCTCCTGTGCAG |
| | Nucleic Acid | CGTCTGGATTCACCTTCAGTAGCTATGGCATGCACTGGGTCCGCCAGGCTCCAGGCAAGGGGCTGGAGTG |
| | Sequence | GGTGGCAGTTATATCGTATGATGGAAGTAATAAATACTATGCAGACTCCGTGAAGGGCCGATTCACCATC |
| | | TCCAGAGACAATTCCAAGAACACGCTGTATCTGCAAATGAACAGCCTGAGAGCCGAGGACACGGCGGTGT |
| | | ACTACTGCGCAAAGGGCAAGCACAGAAGGAGGTCATTCGACATATGGGGTCAGGGTACAATGGTCACCGT |
| | | CTCCTCA |
| 413 | BIIB-12-910_VH | QVQLQESGPGLVKPSQTLSLTCTVSGGSISSGGYYWSWIRQHPGKGLEWIGSIYYSGSTYYNPSLKSRVT |
| | Amino Acid | ISVDTSKNQFSLKLSSVTAADTAVYYCARGPLQRQVRYFDLWGRGTLVTVSS |
| | Sequence | |
| 414 | BIIB-12-910_VH | CAGGTGCAGCTGCAGGAGTCGGGCCCAGGACTGGTGAAGCCTTCACAGACCCTGTCCCTCACCTGTACTG |
| | Nucleic Acid | TCTCTGGTGGCTCCATCAGCAGTGGTGGTTACTACTGGAGCTGGATCCGCCAGCACCCAGGGAAGGGCCT |
| | Sequence | GGAGTGGATTGGGTCAATCTATTACAGTGGGAGCACCTACTACAACCCGTCCCTCAAGAGTCGAGTTACC |
| | | ATATCAGTAGACACGTCTAAGAACCAGTTCTCCCTGAAGCTGAGTTCTGTGACCGCCGCAGACACGGCGG |
| | | TGTACTACTGCGCCAGAGGTCCCTTGCAAAGACAAGTGAGATACTTCGACCTATGGGGGAGAGGTACCTT |
| | | GGTCACCGTCTCCTCA |
| 415 | BIIB-12-911_VH | QVQLVESGGGVVQPGRSLRLSCAASGFTFSSYGMHWVRQAPGKGLEWVAVISYDGSNKYYADSVKGRFTI |
| | Amino Acid | SRDNSKNTLYLQMNSLRAEDTAVYYCARGRGMDVWGQGTTVTVSS |
| | Sequence | |
| 416 | BIIB-12-911_VH | CAGGTGCAGCTGGTGGAGTCTGGGGGAGGCGTGGTCCAGCCTGGGAGGTCCCTGAGACTCTCCTGTGCAG |
| | Nucleic Acid | CGTCTGGATTCACCTTCAGTAGCTATGGCATGCACTGGGTCCGCCAGGCTCCAGGCAAGGGGCTGGAGTG |
| | Sequence | GGTGGCAGTTATATCGTATGATGGAAGTAATAAATACTATGCAGACTCCGTGAAGGGCCGATTCACCATC |
| | | TCCAGAGACAATTCCAAGAACACGCTGTATCTGCAAATGAACAGCCTGAGAGCCGAGGACACGGCGGTGT |
| | | ACTACTGCGCCAGAGGCAGGGGAATGGATGTATGGGGCCAGGGAACAACTGTCACCGTCTCCTCA |
| 417 | BIIB-12-912_VH | QVQLVESGGGVVQPGRSLRLSCAASGFTFSSYGMHWVRQAPGKGLEWVAVISYDGSNKYYADSVKGRFTI |
| | Amino Acid | SRDNSKNTLYLQMNSLRAEDTAVYYCAKSGGRYGYDIWGQGTMVTVSS |
| | Sequence | |
| 418 | BIIB-12-912_VH | CAGGTGCAGCTGGTGGAGTCTGGGGGAGGCGTGGTCCAGCCTGGGAGGTCCCTGAGACTCTCCTGTGCAG |
| | Nucleic Acid | CGTCTGGATTCACCTTCAGTAGCTATGGCATGCACTGGGTCCGCCAGGCTCCAGGCAAGGGGCTGGAGTG |
| | Sequence | GGTGGCAGTTATATCGTATGATGGAAGTAATAAATACTATGCAGACTCCGTGAAGGGCCGATTCACCATC |
| | | TCCAGAGACAATTCCAAGAACACGCTGTATCTGCAAATGAACAGCCTGAGAGCCGAGGACACGGCGGTGT |
| | | ACTACTGCGCCAAGTCCGGTGGAAGATACGGGTACGACATATGGGGTCAGGGTACAATGGTCACCGTCTC |
| | | CTCA |
| 419 | BIIB-12-913_VH | QVQLVQSGAEVKKPGASVKVSCKASGYTFTSYGISWVRQAPGQGLEWMGWISAYNGNTNYAQKLQGRVTM |
| | Amino Acid | TTDTSTSTAYMELRSLRSDDTAVYYCARGGVSRFWGQGTLVTVSS |
| | Sequence | |
| 420 | BIIB-12-913_VH | CAGGTTCAGCTGGTGCAGTCTGGAGCTGAGGTGAAGAAGCCTGGGGCCTCAGTGAAGGTCTCCTGCAAGG |
| | Nucleic Acid | CTTCTGGTTACACCTTTACCAGCTATGGTATCAGCTGGGTGCGACAGGCCCCTGGACAAGGGCTTGAGTG |
| | Sequence | GATGGGATGGATCAGCGCTTACAATGGTAACACAAACTATGCACAGAAGCTCCAGGGCAGAGTCACCATG |
| | | ACCACAGACACATCCACGAGCACAGCCTACATGGAGCTGAGGAGCCTGAGATCTGACGACACGGCGGTGT |
| | | ACTACTGCGCCAGAGGTGGCGTGAGTAGATTCTGGGGACAGGGTACATTGGTCACCGTCTCCTCA |
| 421 | BIB-12-914_VH | QVQLVQSGAEVKKPGASVKVSCKASGYTFTSYYMHWVRQAPGQGLEWMGIINPSGGSTSYAQKFQGRVTM |
| | Amino Acid | TRDTSTSTVYMELSSLRSEDTAVYYCARAPRYRGTMDVWGQGTTVTVSS |
| | Sequence | |
| 422 | BIIB-12-914_VH | CAGGTGCAGCTGGTGCAGTCTGGGGCTGAGGTGAAGAAGCCTGGGGCCTCAGTGAAGGTTTCCTGCAAGG |
| | Nucleic Acid | CATCTGGATACACCTTCACCAGCTACTATATGCACTGGGTGCGACAGGCCCCTGGACAAGGGCTTGAGTG |
| | Sequence | GATGGGAATAATCAACCCTAGTGGTGGTAGCACAAGCTACGCACAGAAGTTCCAGGGCAGAGTCACCATG |
| | | ACCAGGGACACGTCCACGAGCACAGTCTACATGGAGCTGAGCAGCCTGAGATCTGAGGACACGGCGGTGT |
| | | ACTACTGCGCCAGAGCCCCTAGATACCGAGGTACCATGGATGTGTGGGGCCAGGGAACAACTGTCACCGT |
| | | CTCCTCA |
| 423 | BIIB-12-915_VH | QLQLQESGPGLVKPSETLSLTCTVSGGSISSSRYYWGWIRQPPGKGLEWIGSIYYSGSTYYNPSLKSRVT |
| | Amino Acid | ISVDTSKNQFSLKLSSVTAADTAVYYCARVGGGYANPWGQGTLVTVSS |
| | Sequence | |
| 424 | BIIB-12-915_VH | CAGCTGCAGCTGCAGGAGTCGGGCCCAGGACTGGTGAAGCCTTCGGAGACCCTGTCCCTCACCTGCACTG |
| | Nucleic Acid | TCTCTGGTGGCTCCATCAGCAGTAGTCGCTACTACTGGGGCTGGATCCGCCAGCCCCCAGGGAAGGGGCT |
| | Sequence | GGAGTGGATTGGGAGTATCTATTATAGTGGGAGCACCTACTACAACCCGTCCCTCAAGAGTCGAGTCACC |
| | | ATATCCGTAGACACGTCCAAGAACCAGTTCTCCCTGAAGCTGAGTTCTGTGACCGCCGCAGACACGGCGG |
| | | TGTACTACTGCGCCAGAGTTGGAGGAGGATACGCCAACCCATGGGGACAGGGTACATTGGTCACCGTCTC |
| | | CTCA |
| 425 | BIIB-12-916_VH | QVQLVQSGAEVKKPGASVKVSCKASGYTFTSYYMHWVRQAPGQGLEWMGIINPSGGSTSYAQKFQGRVTM |
| | Amino Acid | TRDTSTSTVYMELSSLRSEDTAVYYCARGGRQKATRRVDVWGQGTVVTVSS |
| | Sequence | |
| 426 | BIIB-12-916_VH | CAGGTGCAGCTGGTGCAGTCTGGGGCTGAGGTGAAGAAGCCTGGGGCCTCAGTGAAGGTTTCCTGCAAGG |
| | Nucleic Acid | CATCTGGATACACCTTCACCAGCTACTATATGCACTGGGTGCGACAGGCCCCTGGACAAGGGCTTGAGTG |
| | Sequence | GATGGGAATAATCAACCCTAGTGGTGGTAGCACAAGCTACGCACAGAAGTTCCAGGGCAGAGTCACCATG |
| | | ACCAGGGACACGTCCACGAGCACAGTCTACATGGAGCTGAGCAGCCTGAGATCTGAGGACACGGCGGTGT |
| | | ACTACTGCGCCAGAGGAGGTAGACAAAAGGCAACAAGGAGGGTAGACGTATGGGGTCAGGGTACAGTGGT |
| | | CACCGTCTCCTCA |
| 427 | BIIB-12-917_VH | EVQLVQSGAEVKKPGESLKISCKGSGYSFTTYWIGWVRQMPGKGLEWMGIIYPGDSDTRYSPSFQGQVTI |
| | Amino Acid | SADKSISTAYLQWSSLKASDTAMYYCARGRFRPRGRFDYWGQGTLVTVSS |
| | Sequence | |
| 428 | BIIB-12-917_VH | GAGGTGCAGCTGGTGCAGTCTGGAGCAGAGGTGAAAAAGCCCGGGGAGTCTCTGAAGATCTCCTGTAAGG |
| | Nucleic Acid | GTTCTGGATACAGCTTTACCACCTACTGGATCGGCTGGGTGCGCCAGATGCCCGGGAAAGGCCTGGAGTG |
| | Sequence | GATGGGGATCATCTATCCTGGTGACTCTGATACCAGATACAGCCCGTCCTTCCAAGGCCAGGTCACCATC |
| | | TCAGCCGACAAGTCCATCAGCACCGCCTACCTGCAGTGGAGCAGCCTGAAGGCCTCGGACACGGCGATGT |
| | | ACTACTGCGCCAGAGGCAGATTCAGACCTAGAGGCAGATTCGACTACTGGGGACAGGGTACATTGGTCAC |
| | | CGTCTCCTCA |
| 429 | BIIB-12-918_VH | QVQLVESGGGVVQPGRSLRLSCAASGFTFSSYGMHWVRQAPGKGLEWVAVISYDGSNKYYADSVKGRFTI |
| | Amino Acid | SRDNSKNTLYLQMNSLRAEDTAVYYCAKSLGGRSFDIWGQGTMVTVSS |
| | Sequence | |
| 430 | BIIB-12-918_VH | CAGGTGCAGCTGGTGGAGTCTGGGGGAGGCGTGGTCCAGCCTGGGAGGTCCCTGAGACTCTCCTGTGCAG |
| | Nucleic Acid | CGTCTGGATTCACCTTCAGTAGCTATGGCATGCACTGGGTCCGCCAGGCTCCAGGCAAGGGGCTGGAGTG |
| | Sequence | GGTGGCAGTTATATCGTATGATGGAAGTAATAAATACTATGCAGACTCCGTGAAGGGCCGATTCACCATC |
| | | TCCAGAGACAATTCCAAGAACACGCTGTATCTGCAAATGAACAGCCTGAGAGCCGAGGACACGGCGGTGT |
| | | ACTACTGCGCAAAGAGCTTGGGAGGTAGATCATTCGACATATGGGGTCAGGGTACAATGGTCACCGTCTC |
| | | CTCA |
| 431 | BIIB-12-919_VH | QVQLVQSGAEVKKPGASVKVSCKASGYTFTSYYMHWVRQAPGQGLEWMGVINPSGGSTSYAQKFQGRVTM |
| | Amino Acid | TRDTSTSTVYMELSSLRSEDTAVYYCARGANIAVGRRYADYWGQGTLVTVSS |
| | Sequence | |
| 432 | BIIB-12-919_VH | CAGGTGCAGCTGGTGCAGTCTGGGGCTGAGGTGAAGAAGCCTGGGGCCTCAGTGAAGGTTTCCTGCAAGG |
| | Nucleic Acid | CATCTGGATACACCTTCACCAGCTACTATATGCACTGGGTGCGACAGGCCCCTGGACAAGGGCTTGAGTG |
| | Sequence | GATGGGAGTCATCAACCCTAGTGGTGGTAGCACAAGCTACGCACAGAAGTTCCAGGGCAGAGTCACCATG |
| | | ACCAGGGACACGTCCACGAGCACAGTCTACATGGAGCTGAGCAGCCTGAGATCTGAGGACACGGCGGTGT |
| | | ACTACTGCGCCAGAGGTGCTAACATAGCAGTCGGCAGACGCTACGCAGACTACTGGGGACAGGGTACATT |
| | | GGTCACCGTCTCCTCA |
| 433 | BIIB-12-920_VH | QVQLVQSGAEVKKPGASVKVSCKASGYTFTSYGISWVRQAPGQGLEWMGWISPYNGNTNYAQKLQGRVTM |
| | Amino Acid | TTDTSTSTAYMELRSLRSDDTAVYYCARGSGHTTMFWGQGTLVTVSS |
| | Sequence | |
| 434 | BIIB-12-920_VH | CAGGTTCAGCTGGTGCAGTCTGGAGCTGAGGTGAAGAAGCCTGGGGCCTCAGTGAAGGTCTCCTGCAAGG |
| | Nucleic Acid | CTTCTGGTTACACCTTTACCAGCTATGGTATCAGCTGGGTGCGACAGGCCCCTGGACAAGGGCTTGAGTG |
| | Sequence | GATGGGATGGATCAGCCCTTACAATGGTAACACAAACTATGCACAGAAGCTCCAGGGCAGAGTCACCATG |
| | | ACCACAGACACATCCACGAGCACAGCCTACATGGAGCTGAGGAGCCTGAGATCTGACGACACGGCGGTGT |
| | | ACTACTGCGCCAGAGGGTCTGGACACACAACCATGTTCTGGGGACAGGGTACATTGGTCACCGTCTCCTC |
| | | A |
| 435 | BIIB-12-921_VH | QVQLVESGGGVVQPGRSLRLSCAASGFTFSSYGMHWVRQAPGKGLEWVAVISYDGSNKYYADSVKGRFTI |
| | Amino Acid | SRDNSKNTLYLQMNSLRAEDTAVYYCAKVGDRGTRAFDPWGQGTLVTVSS |
| | Sequence | |
| 436 | BIIB-12-921_VH | CAGGTGCAGCTGGTGGAGTCTGGGGGAGGCGTGGTCCAGCCTGGGAGGTCCCTGAGACTCTCCTGTGCAG |
| | Nucleic Acid | CGTCTGGATTCACCTTCAGTAGCTATGGCATGCACTGGGTCCGCCAGGCTCCAGGCAAGGGGCTGGAGTG |
| | Sequence | GGTGGCAGTTATATCGTATGATGGAAGTAATAAATACTATGCAGACTCCGTGAAGGGCCGATTCACCATC |
| | | TCCAGAGACAATTCCAAGAACACGCTGTATCTGCAAATGAACAGCCTGAGAGCCGAGGACACGGCGGTGT |
| | | ACTACTGCGCCAAGGTAGGAGACAGAGGTACCCGTGCATTCGACCCATGGGGACAGGGTACATTGGTCAC |
| | | CGTCTCCTCA |
| 437 | BIIB-12-922_VH | QVQLVQSGAEVKKPGASVKVSCKASGYTFTSYYMHWVRQAPGQGLEWMGIINPSGGSTSYAQKFQGRVTM |
| | Amino Acid | TRDTSTSTVYMELSSLRSEDTAVYYCARRGRIAGMWGQGTTVTVSS |
| | Sequence | |
| 438 | BIIB-12-922_VH | CAGGTGCAGCTGGTGCAGTCTGGGGCTGAGGTGAAGAAGCCTGGGGCCTCAGTGAAGGTTTCCTGCAAGG |
| | Nucleic Acid | CATCTGGATACACCTTCACCAGCTACTATATGCACTGGGTGCGACAGGCCCCTGGACAAGGGCTTGAGTG |
| | Sequence | GATGGGAATAATCAACCCTAGTGGTGGTAGCACAAGCTACGCACAGAAGTTCCAGGGCAGAGTCACCATG |
| | | ACCAGGGACACGTCCACGAGCACAGTCTACATGGAGCTGAGCAGCCTGAGATCTGAGGACACGGCGGTGT |
| | | ACTACTGCGCCAGAAGAGGACGCATAGCAGGCATGTGGGGCCAGGGAACAACTGTCACCGTCTCCTCA |
| 439 | BIIB-12-923_VH | QVQLVQSGAEVKKPGASVKVSCKASGYTFTSYYMHWVRQAPGQGLEWMGIINPSGGSTSYAQKFQGRVTM |
| | Amino Acid | TRDTSTSTVYMELSSLRSEDTAVYYCARGAGYLQRAFDIWGQGTMVTVSS |
| | Sequence | |
| 440 | BIIB-12-923_VH | CAGGTGCAGCTGGTGCAGTCTGGGGCTGAGGTGAAGAAGCCTGGGGCCTCAGTGAAGGTTTCCTGCAAGG |
| | Nucleic Acid | CATCTGGATACACCTTCACCAGCTACTATATGCACTGGGTGCGACAGGCCCCTGGACAAGGGCTTGAGTG |
| | Sequence | GATGGGAATAATCAACCCTAGTGGTGGTAGCACAAGCTACGCACAGAAGTTCCAGGGCAGAGTCACCATG |
| | | ACCAGGGACACGTCCACGAGCACAGTCTACATGGAGCTGAGCAGCCTGAGATCTGAGGACACGGCGGTGT |
| | | ACTACTGCGCCAGAGGTGCCGGATATCTACAGAGAGCCTTCGATATATGGGGTCAGGGTACAATGGTCAC |
| | | CGTCTCCTCA |
| 441 | BIIB-12-924_VH | QVQLVESGGGVVQPGRSLRLSCAASGFTFSSYGMHWVRQAPGKGLEWVAVISYDGSNKYYADSVKGRFTI |
| | Amino Acid | SRDNSKNTLYLQMNSLRAEDTAVYYCAKGKSSERGLNPWGQGTLVTVSS |
| | Sequence | |
| 442 | BIIB-12-924_VH | CAGGTGCAGCTGGTGGAGTCTGGGGGAGGCGTGGTCCAGCCTGGGAGGTCCCTGAGACTCTCCTGTGCAG |
| | Nucleic Acid | CGTCTGGATTCACCTTCAGTAGCTATGGCATGCACTGGGTCCGCCAGGCTCCAGGCAAGGGGCTGGAGTG |
| | Sequence | GGTGGCAGTTATATCGTATGATGGAAGTAATAAATACTATGCAGACTCCGTGAAGGGCCGATTCACCATC |
| | | TCCAGAGACAATTCCAAGAACACGCTGTATCTGCAAATGAACAGCCTGAGAGCCGAGGACACGGCGGTGT |
| | | ACTACTGCGCAAAGGGCAAGAGCTCGGAACGAGGTCTCAACCCATGGGGACAGGGTACATTGGTCACCGT |
| | | CTCCTCA |
| 443 | BIIB-12-926_VH | QVQLVQSGAEVKKPGASVKVSCKASGYTFTSYYMHWVRQAPGQGLEWMGIINPSGGSTSYAQKFQGRVTM |
| | Amino Acid | TRDTSTSTVYMELSSLRSEDTAVYYCARDGRMARGASPDYWGQGTLVTVSS |
| | Sequence | |
| 444 | BIIB-12-926_VH | CAGGTGCAGCTGGTGCAGTCTGGGGCTGAGGTGAAGAAGCCTGGGGCCTCAGTGAAGGTTTCCTGCAAGG |
| | Nucleic Acid | CATCTGGATACACCTTCACCAGCTACTATATGCACTGGGTGCGACAGGCCCCTGGACAAGGGCTTGAGTG |
| | Sequence | GATGGGAATAATCAACCCTAGTGGTGGTAGCACAAGCTACGCACAGAAGTTCCAGGGCAGAGTCACCATG |
| | | ACCAGGGACACGTCCACGAGCACAGTCTACATGGAGCTGAGCAGCCTGAGATCTGAGGACACGGCGGTGT |
| | | ACTACTGCGCCAGAGACGGCAGAATGGCAAGAGGTGCTAGCCCAGATTACTGGGGACAGGGTACATTGGT |
| | | CACCGTCTCCTCA |
| 445 | BIIB-12-927_VH | QVQLVQSGAEVKKPGASVKVSCKASGYTFTSYYMSWVRQAPGQGLEWMGIINPSGGSTSYAQKFQGRVTM |
| | Amino Acid | TRDTSTSTVYMELSSLRSEDTAVYYCARDSGRKRYYYMDVWGKGTTVTVSS |
| | Sequence | |
| 446 | BIIB-12-927_VH | CAGGTGCAGCTGGTGCAGTCTGGGGCTGAGGTGAAGAAGCCTGGGGCCTCAGTGAAGGTTTCCTGCAAGG |
| | Nucleic Acid | CATCTGGATACACCTTCACCAGCTACTATATGTCATGGGTGCGACAGGCCCCTGGACAAGGGCTTGAGTG |
| | Sequence | GATGGGAATAATCAACCCTAGTGGTGGTAGCACAAGCTACGCACAGAAGTTCCAGGGCAGAGTCACCATG |
| | | ACCAGGGACACGTCCACGAGCACAGTCTACATGGAGCTGAGCAGCCTGAGATCTGAGGACACGGCGGTGT |
| | | ACTACTGCGCCAGAGACTCAGGAAGGAAAAGATACTACTACATGGACGTATGGGGCAAGGGTACAACTGT |
| | | CACCGTCTCCTCA |
| 447 | BIIB-12-928_VH | QVQLVEFGVGVVQPGRSLRLSCAASGFTFSSYGMHWVRQAPGKGLEWVAVISYDGSNKYYADSVKGRFTI |
| | Amino Acid | SRDNSKNTLYLQMNSLRAEDTAVYYCAKGGTYLDTWGQGTLVTVSS |
| | Sequence | |
| 448 | BIIB-12-928_VH | CAGGTGCAGCTGGTGGAGTTTGGGGTAGGCGTGGTCCAGCCTGGGAGGTCCCTGAGACTCTCCTGTGCAG |
| | Nucleic Acid | CGTCTGGATTCACCTTCAGTAGCTATGGCATGCACTGGGTCCGCCAGGCTCCAGGCAAGGGGCTGGAGTG |
| | Sequence | GGTGGCAGTTATATCGTATGATGGAAGTAATAAATACTATGCAGACTCCGTGAAGGGCCGATTCACCATC |
| | | TCCAGAGACAATTCCAAGAACACGCTGTATCTGCAAATGAACAGCCTGAGAGCCGAGGACACGGCGGTGT |
| | | ACTACTGCGCCAAGGGCGGAACATACTTAGACACTTGGGGACAGGGTACATTGGTCACCGTCTCCTCA ( |
| 449 | BIIB-12-929_VH | QVQLVQSGAEVKKPGASVKVSCKASGYTFTSYYMHWVRQAPGQGLEWMGIINPSGGSTSYAQKFQGRVTM |
| | Amino Acid | TRDTSTSTVYMELSSLRSEDTAVYYCARDQGYSRSFDIWGQGTMVTVSS |
| | Sequence | |
| 450 | BIIB-12-929_VH | CAGGTGCAGCTGGTGCAGTCTGGGGCTGAGGTGAAGAAGCCTGGGGCCTCAGTGAAGGTTTCCTGCAAGG |
| | Nucleic Acid | CATCTGGATACACCTTCACCAGCTACTATATGCACTGGGTGCGACAGGCCCCTGGACAAGGGCTTGAGTG |
| | Sequence | GATGGGAATAATCAACCCTAGTGGTGGTAGCACAAGCTACGCACAGAAGTTCCAGGGCAGAGTCACCATG |
| | | ACCAGGGACACGTCCACGAGCACAGTCTACATGGAGCTGAGCAGCCTGAGATCTGAGGACACGGCGGTGT |
| | | ACTACTGCGCCAGGGACCAGGGATACTCAAGGTCATTCGACATATGGGGTCAGGGTACAATGGTCACCGT |
| | | CTCCTCA |
| 451 | BIIB-12-930_VH | QVQLVQSGAEVKKPGASVKVSCKASGYTFTSYYMHWVRQAPGQGLEWMGIINPSGGSTSYAQKFQGRVTM |
| | Amino Acid | TRDTSTSTVYMELSSLRSEDTAVYYCARVRQKATLLFQHWGQGTLVTVSS |
| | Sequence | |
| 452 | BIIB-12-930_VH | CAGGTGCAGCTGGTGCAGTCTGGGGCTGAGGTGAAGAAGCCTGGGGCCTCAGTGAAGGTTTCCTGCAAGG |
| | Nucleic Acid | CATCTGGATACACCTTCACCAGCTACTATATGCACTGGGTGCGACAGGCCCCTGGACAAGGGCTTGAGTG |
| | Sequence | GATGGGAATAATCAACCCTAGTGGTGGTAGCACAAGCTACGCACAGAAGTTCCAGGGCAGAGTCACCATG |
| | | ACCAGGGACACGTCCACGAGCACAGTCTACATGGAGCTGAGCAGCCTGAGATCTGAGGACACGGCGGTGT |
| | | ACTACTGCGCCAGGGTCAGACAAAAGGCAACATTGTTGTTCCAACACTGGGGACAGGGTACATTGGTCAC |
| | | CGTCTCCTCA |
| 453 | BIIB-12-931_VH | QVQLVQSGAEVKKPGASVKVSCKASGYTFTSYYMSWVRQAPGQGLEWMGIINPSGGSTSYAQKFQGRVTM |
| | Amino Acid | TRDTSTSTVYMELSSLRSEDTAVYYCARDPVQEYGPYYYYMDVWGKGTTVTVSS |
| | Sequence | |
| 454 | BIIB-12-931_VH | CAGGTGCAGCTGGTGCAGTCTGGGGCTGAGGTGAAGAAGCCTGGGGCCTCAGTGAAGGTTTCCTGCAAGG |
| | Nucleic Acid | CATCTGGATACACCTTCACCAGCTACTATATGTCATGGGTGCGACAGGCCCCTGGACAAGGGCTTGAGTG |
| | Sequence | GATGGGAATAATCAACCCTAGTGGTGGTAGCACAAGCTACGCACAGAAGTTCCAGGGCAGAGTCACCATG |
| | | ACCAGGGACACGTCCACGAGCACAGTCTACATGGAGCTGAGCAGCCTGAGATCTGAGGACACGGCGGTGT |
| | | ACTACTGCGCCAGAGATCCGGTGCAGGAGTACGGCCCCTACTACTACTACATGGACGTATGGGGCAAGGG |
| | | TACAACTGTCACCGTCTCCTCA |
| 455 | BIIB-12-932_VH | QVQLVESGGGVVQPGRSLRLSCAASGFTFSSYGMHWVRQAPGKGLEWVAVISYDGSNKYYADSVKGRFTI |
| | Amino Acid | SRDNSKNTLYLQMNSLRAEDTAVYYCARLGYRGASAFDIWGQGTMVTVSS |
| | Sequence | |
| 456 | BIIB-12-932_VH | CAGGTGCAGCTGGTGGAGTCTGGGGGAGGCGTGGTCCAGCCTGGGAGGTCCCTGAGACTCTCCTGTGCAG |
| | Amino Acid | CGTCTGGATTCACCTTCAGTAGCTATGGCATGCACTGGGTCCGCCAGGCTCCAGGCAAGGGGCTGGAGTG |
| | Sequence | GGTGGCAGTTATATCGTATGATGGAAGTAATAAATACTATGCAGACTCCGTGAAGGGCCGATTCACCATC |
| | | TCCAGAGACAATTCCAAGAACACGCTGTATCTGCAAATGAACAGCCTGAGAGCCGAGGACACGGCGGTGT |
| | | ACTACTGCGCCAGATTGGGATACAGAGGGGCCTCAGCTTTCGACATATGGGGTCAGGGTACAATGGTCAC |
| | | CGTCTCCTCA |
| 457 | BIIB-12-933_VH | QVQLVESGGGVVQPGRSLRLSCAASGFTFSSYGMHWVRQAPGKGLEWVAVISYDGSNKYYADSVKGRFTI |
| | Amino Acid | SRDNSKNTLYLQMNSLRAEDTAVYYCARLPRFTGTAYWGQGTLVTVSS |
| | Sequence | |
| 458 | BIIB-12-933_VH | CAGGTGCAGCTGGTGGAGTCTGGGGGAGGCGTGGTCCAGCCTGGGAGGTCCCTGAGACTCTCCTGTGCAG |
| | Nucleic Acid | CGTCTGGATTCACCTTCAGTAGCTATGGCATGCACTGGGTCCGCCAGGCTCCAGGCAAGGGGCTGGAGTG |
| | Sequence | GGTGGCAGTTATATCGTATGATGGAAGTAATAAATACTATGCAGACTCCGTGAAGGGCCGATTCACCATC |
| | | TCCAGAGACAATTCCAAGAACACGCTGTATCTGCAAATGAACAGCCTGAGAGCCGAGGACACGGCGGTGT |
| | | ACTACTGCGCCAGACTTCCTAGATTCACTGGTACCGCTTACTGGGGACAGGGTACATTGGTCACCGTCTC |
| | | CTCA |
| 459 | BIIB-12-934_VH | QVQLVESGGGVVQPGRSLRLSCAASGFTFSSYGMHWVRQAPGKGLEWVAVISYDGSNKYYADSVKGRFTI |
| | Amino Acid | SRDNSKNTLYLQMNSLRAEDTAVYYCARESGGHSYGMDVWGQGTTVTVSS |
| | Sequence | |
| 460 | BIIB-12-934_VH | CAGGTGCAGCTGGTGGAGTCTGGGGGAGGCGTGGTCCAGCCTGGGAGGTCCCTGAGACTCTCCTGTGCAG |
| | Nucleic Acid | CGTCTGGATTCACCTTCAGTAGCTATGGCATGCACTGGGTCCGCCAGGCTCCAGGCAAGGGGCTGGAGTG |
| | Sequence | GGTGGCAGTTATATCGTATGATGGAAGTAATAAATACTATGCAGACTCCGTGAAGGGCCGATTCACCATC |
| | | TCCAGAGACAATTCCAAGAACACGCTGTATCTGCAAATGAACAGCCTGAGAGCCGAGGACACGGCGGTGT |
| | | ACTACTGCGCCAGAGAGTCTGGAGGTCACAGCTACGGAATGGACGTATGGGGCCAGGGAACAACTGTCAC |
| | | CGTCTCCTCA |
| 461 | BIIB-12-935_VH | QVQLVESGGGVVQPGRSLRLSCAASGFTFSSYGMHWVRQAPGKGLEWVAVISYDGSNKYYADSVKGRFTI |
| | Amino Acid | SRDNSKNTLYLQMNSLRAEDTAVYYCARELEYGHYGMDVWGQGTTVTVSS |
| | Sequence | |
| 462 | BIIB-12-935_VH | CAGGTGCAGCTGGTGGAGTCTGGGGGAGGCGTGGTCCAGCCTGGGAGGTCCCTGAGACTCTCCTGTGCAG |
| | Nucleic Acid | CGTCTGGATTCACCTTCAGTAGCTATGGCATGCACTGGGTCCGCCAGGCTCCAGGCAAGGGGCTGGAGTG |
| | Sequence | GGTGGCAGTTATATCGTATGATGGAAGTAATAAATACTATGCAGACTCCGTGAAGGGCCGATTCACCATC |
| | | TCCAGAGACAATTCCAAGAACACGCTGTATCTGCAAATGAACAGCCTGAGAGCCGAGGACACGGCGGTGT |
| | | ACTACTGCGCCAGAGAGTTGGAATATGGGCATTACGGAATGGACGTATGGGGCCAGGGAACAACTGTCAC |
| | | CGTCTCCTCA |
| 463 | BIIB-12-936_VH | EVQLLESGGGLVQPGGSLRLSCAASGFTFSSYAMSWVRQAPGKGLEWVSAISGSGGSTYYADSVKGRFTI |
| | Amino Acid | SRDNSKNTLYLQMNSLRAEDTAVYYCAKDGGWYEAYGMDVWGQGTTVTVSS |
| | Sequence | |
| 464 | BIIB-12-936_VH | GAGGTGCAGCTGTTGGAGTCTGGGGGAGGCTTGGTACAGCCTGGGGGGTCCCTGAGACTCTCCTGTGCAG |
| | Nucleic Acid | CCTCTGGATTCACCTTTAGCAGCTATGCCATGAGCTGGGTCCGCCAGGCTCCAGGGAAGGGGCTGGAGTG |
| | Sequence | GGTCTCAGCTATTAGTGGTAGTGGTGGTAGCACATACTACGCAGACTCCGTGAAGGGCCGGTTCACCATC |
| | | TCCAGAGACAATTCCAAGAACACGCTGTATCTGCAAATGAACAGCCTGAGAGCCGAGGACACGGCGGTGT |
| | | ACTACTGCGCCAAGGACGGTGGATGGTACGAGGCATACGGAATGGACGTATGGGGCCAGGGAACAACTGT |
| | | CACCGTCTCCTCA |
| 465 | BIIB-12-937_VH | QVQLVQSGAEVKKPGASVKVSCKASGYTFTSYYMHWVRQAPGQGLEWMGIINPSGGSTSYAQKFQGRVTM |
| | Amino Acid | TRDTSTSTVYMELSSLRSEDTAVYYCARPTRMLRSYGMDVWGQGTTVTVSS |
| | Sequence | |
| 466 | BIIB-12-937_VH | CAGGTGCAGCTGGTGCAGTCTGGGGCTGAGGTGAAGAAGCCTGGGGCCTCAGTGAAGGTTTCCTGCAAGG |
| | Nucleic Acid | CATCTGGATACACCTTCACCAGCTACTATATGCACTGGGTGCGACAGGCCCCTGGACAAGGGCTTGAGTG |
| | Sequence | GATGGGAATAATCAACCCTAGTGGTGGTAGCACAAGCTACGCACAGAAGTTCCAGGGCAGAGTCACCATG |
| | | ACCAGGGACACGTCCACGAGCACAGTCTACATGGAGCTGAGCAGCCTGAGATCTGAGGACACGGCGGTGT |
| | | ACTACTGCGCCAGACCTACTAGGATGTTAAGGAGCTACGGAATGGACGTATGGGGCCAGGGAACAACTGT |
| | | CACCGTCTCCTCA |
| 467 | BIIB-12-1288_VH | QVQLVQSGAEVKKPGASVKVSCKASGYTFTSYYMHWVRQAPGQGLEWMGIINPSGGSTSYAQKFQGRVTM |
| | Amino Acid | TRDTSTSTVYMELSSLRSEDTAVYYCARGGANDYGSSSRWWYFDLWGRGTLVTVSS |
| | Sequence | |
| 468 | BIIB-12-1288_VH | CAGGTGCAGCTGGTGCAGTCTGGGGCTGAGGTGAAGAAGCCTGGGGCCTCAGTGAAGGTTTCCTGCAAGG |
| | Nucleic Acid | CATCTGGATACACCTTCACCAGCTACTATATGCACTGGGTGCGACAGGCCCCTGGACAAGGGCTTGAGTG |
| | Sequence | GATGGGAATAATCAACCCTAGTGGTGGTAGCACAAGCTACGCACAGAAGTTCCAGGGCAGAGTCACCATG |
| | | ACCAGGGACACGTCCACGAGCACAGTCTACATGGAGCTGAGCAGCCTGAGATCTGAGGACACGGCGGTGT |
| | | ACTACTGCGCCAGAGGAGGTGCTAACGACTACGGCAGCAGCAGCCGATGGTGGTACTTCGACTTATGGGG |
| | | GAGAGGTACCTTGGTCACCGTCTCCTCA |
| 469 | BIIB-12-1289_VH | QVQLVQSGAEVKKPGASVKVSCKASGYTFTSYYMHWVRQAPGQGLEWMGIINPGGGSTSYAQKFQGRVTM |
| | Amino Acid | TRDTSTSTVYMELSSLRSEDTAVYYCARGPPRTYATGSHNWFDPWGQGTLVTVSS |
| | Sequence | |
| 470 | BIIB-12-1289_VH | CAGGTGCAGCTGGTGCAGTCTGGGGCTGAGGTGAAGAAGCCTGGGGCCTCAGTGAAGGTTTCCTGCAAGG |
| | Nucleic Acid | CATCTGGATACACCTTCACCAGCTACTATATGCACTGGGTGCGACAGGCCCCTGGACAAGGGCTTGAGTG |
| | Sequence | GATGGGAATAATCAACCCTGGTGGTGGTAGCACAAGCTACGCACAGAAGTTCCAGGGCAGAGTCACCATG |
| | | ACCAGGGACACGTCCACGAGCACAGTCTACATGGAGCTGAGCAGCCTGAGATCTGAGGACACGGCGGTGT |
| | | ACTACTGCGCCAGAGGACCGCCTAGAACCTACGCAACCGGAAGCCACAATTGGTTCGACCCCTGGGGACA |
| | | GGGTACATTGGTCACCGTCTCCTCA |
| 471 | BIIB-12-1290_VH | QVQLVQSGAEVKKPGASVKVSCKASGYTFTSYYMHWVRQAPGQGLEWMGIINPGGGSTSYAQKFQGRVTM |
| | Amino Acid | TRDTSTSTVYMELSSLRSEDTAVYYCAREGGRYVRGMDVWGQGTTVTVSS |
| | Sequence | |
| 472 | BIIB-12-1290_VH | CAGGTGCAGCTGGTGCAGTCTGGGGCTGAGGTGAAGAAGCCTGGGGCCTCAGTGAAGGTTTCCTGCAAGG |
| | Nucleic Acid | CATCTGGATACACCTTCACCAGCTACTATATGCACTGGGTGCGACAGGCCCCTGGACAAGGGCTTGAGTG |
| | Sequence | GATGGGAATAATCAACCCTGGTGGTGGTAGCACAAGCTACGCACAGAAGTTCCAGGGCAGAGTCACCATG |
| | | ACCAGGGACACGTCCACGAGCACAGTCTACATGGAGCTGAGCAGCCTGAGATCTGAGGACACGGCGGTGT |
| | | ACTACTGCGCCAGAGAGGGAGGAAGATACGTGAGAGGAATGGACGTATGGGGCCAGGGAACAACTGTCAC |
| | | CGTCTCCTCA |
| 473 | BIIB-12-1291_VH | QVQLVQSGAEVKKPGASVKVSCKASGYTFTSYYMHWVRQAPGQGLEWMGIINPSGGSTSYAQKFQGRVTM |
| | Amino Acid | TRDTSTSTVYMELSSLRSEDTAVYYCARSRRMWVGYFDLWGRGTLVTVSS |
| | Sequence | |
| 474 | BIIB-12-1291_VH | CAGGTGCAGCTGGTGCAGTCTGGGGCTGAGGTGAAGAAGCCTGGGGCCTCAGTGAAGGTTTCCTGCAAGG |
| | Nucleic Acid | CATCTGGATACACCTTCACCAGCTACTATATGCACTGGGTGCGACAGGCCCCTGGACAAGGGCTTGAGTG |
| | Sequence | GATGGGAATAATCAACCCTAGTGGTGGTAGCACAAGCTACGCACAGAAGTTCCAGGGCAGAGTCACCATG |
| | | ACCAGGGACACGTCCACGAGCACAGTCTACATGGAGCTGAGCAGCCTGAGATCTGAGGACACGGCGGTGT |
| | | ACTACTGCGCTAGATCAAGAAGGATGTGGGTAGGCTACTTCGACCTATGGGGGAGAGGTACCTTGGTCAC |
| | | CGTCTCCTCA |
| 475 | BIIB-12-1292_VH | QVQLVQSGAEVKKPGASVKVSCKASGYTFTSYYIHWVRQAPGQGLEWMGIINPSGGSTSYAQKFQGRVTM |
| | Amino Acid | TRDTSTSTVYMELSSLRSEDTAVYYCARDPGRRQSSGFDYWGQGTLVTVSS |
| | Sequence | |
| 476 | BIIB-12-1292_VH | CAGGTGCAGCTGGTGCAGTCTGGGGCTGAGGTGAAGAAGCCTGGGGCCTCAGTGAAGGTTTCCTGCAAGG |
| | Nucleic Acid | CATCTGGATACACCTTCACCAGCTACTATATCCACTGGGTGCGACAGGCCCCTGGACAAGGGCTTGAGTG |
| | Sequence | GATGGGAATAATCAACCCTAGTGGTGGTAGCACAAGCTACGCACAGAAGTTCCAGGGCAGAGTCACCATG |
| | | ACCAGGGACACGTCCACGAGCACAGTCTACATGGAGCTGAGCAGCCTGAGATCTGAGGACACGGCGGTGT |
| | | ACTACTGCGCCAGAGATCCAGGAAGAAGGCAAAGTTCTGGATTCGATTACTGGGGACAGGGTACATTGGT |
| | | CACCGTCTCCTCA |
| 477 | BIIB-12-1293_VH | QVQLVQSGAEVKKPGASVKVSCKASGYTFTSYYMHWVRQAPGQGLEWMGIINPSGGSTSYAQKFQGRVTM |
| | Amino Acid | TRDTSTSTVYMELSSLRSEDTAVYYCARGSGGKHRGLDVWGQGTMVTVSS |
| | Sequence | |
| 478 | BIIB-12-1293_VH | CAGGTGCAGCTGGTGCAGTCTGGGGCTGAGGTGAAGAAGCCTGGGGCCTCAGTGAAGGTTTCCTGCAAGG |
| | Nucleic Acid | CATCTGGATACACCTTCACCAGCTACTATATGCACTGGGTGCGACAGGCCCCTGGACAAGGGCTTGAGTG |
| | Sequence | GATGGGAATAATCAACCCTAGTGGTGGTAGCACAAGCTACGCACAGAAGTTCCAGGGCAGAGTCACCATG |
| | | ACCAGGGACACGTCCACGAGCACAGTCTACATGGAGCTGAGCAGCCTGAGATCTGAGGACACGGCGGTGT |
| | | ACTACTGCGCCAGAGGCTCTGGAGGCAAACACAGAGGTCTAGACGTATGGGGTCAGGGTACAATGGTCAC |
| | | CGTCTCCTCA |
| 479 | BIIB-12-1294_VH | QVQLVQSGAEVKKPGASVKVSCKASGYTFTSYYMHWVRQAPGQGLEWMGIINPSGGSTSYAQKFQGRVTM |
| | Amino Acid | TRDTSTSTVYMELSSLRSEDTAVYYCARGTRSSRDMDVWGQGTTVTVSS |
| | Sequence | |
| 480 | BIIB-12-1294_VH | CAGGTGCAGCTGGTGCAGTCTGGGGCTGAGGTGAAGAAGCCTGGGGCCTCAGTGAAGGTTTCCTGCAAGG |
| | Nucleic Acid | CATCTGGATACACCTTCACCAGCTACTATATGCACTGGGTGCGACAGGCCCCTGGACAAGGGCTTGAGTG |
| | Sequence | GATGGGAATAATCAACCCTAGTGGTGGTAGCACAAGCTACGCACAGAAGTTCCAGGGCAGAGTCACCATG |
| | | ACCAGGGACACGTCCACGAGCACAGTCTACATGGAGCTGAGCAGCCTGAGATCTGAGGACACGGCGGTGT |
| | | ACTACTGCGCCAGAGGCACTAGATCCAGCAGAGACATGGATGTGTGGGGCCAGGGAACAACTGTCACCGT |
| | | CTCCTCA |
| 481 | BIIB-12-1295_VH | QVQLVQSGAEVKKPGASVKVSCKASGYTFTSYYMVWVRQAPGQGLEWMGIINPSGGSTSYAQKFQGRVTM |
| | Amino Acid | TRDTSTSTVYMELSSLRSEDTAVYYCARVGGATTGKIGYGMDVWGQGTTVTVSS |
| | Sequence | |
| 482 | BIIB-12-1295_VH | CAGGTGCAGCTGGTGCAGTCTGGGGCTGAGGTGAAGAAGCCTGGGGCCTCAGTGAAGGTTTCCTGCAAGG |
| | Nucleic Acid | CATCTGGATACACCTTCACCAGCTACTATATGGTCTGGGTGCGACAGGCCCCTGGACAAGGGCTTGAGTG |
| | Sequence | GATGGGAATAATCAACCCTAGTGGTGGTAGCACAAGCTACGCACAGAAGTTCCAGGGCAGAGTCACCATG |
| | | ACCAGGGACACGTCCACGAGCACAGTCTACATGGAGCTGAGCAGCCTGAGATCTGAGGACACGGCGGTGT |
| | | ACTACTGCGCCAGAGTTGGAGGAGCCACCACAGGGAAAATCGGATACGGAATGGACGTATGGGGCCAGGG |
| | | AACAACTGTCACCGTCTCCTCA |
| 483 | BIIB-12-1296_VH | EVQLLESGGGLVQPGGSLRLSCAASGFTFSTYAMSWVRQAPGKGLEWVSAISGSGGSTYYADSVKGRFTI |
| | Amino Acid | SRDNSKNTLYLQMNSLRAEDTAVYYCAKGPPHYYYLWYFDLWGRGTLVTVSS |
| | Sequence | |
| 484 | BIIB-12-1296_VH | GAGGTGCAGCTGTTGGAGTCTGGGGGAGGCTTGGTACAGCCTGGGGGGTCCCTGAGACTCTCCTGTGCAG |
| | Nucleic Acid | CCTCTGGATTCACCTTTAGCACCTATGCCATGAGCTGGGTCCGCCAGGCTCCAGGGAAGGGGCTGGAGTG |
| | Sequence | GGTCTCAGCTATTAGTGGTAGTGGTGGTAGCACATACTACGCAGACTCCGTGAAGGGCCGGTTCACCATC |
| | | TCCAGAGACAATTCCAAGAACACGCTGTATCTGCAAATGAACAGCCTGAGAGCCGAGGACACGGCGGTGT |
| | | ACTACTGCGCCAAGGGCCCTCCTCACTACTACTATCTCTGGTACTTCGACCTATGGGGGAGAGGTACCTT |
| | | GGTCACCGTCTCCTCA |
| 485 | BIIB-12-1297_VH | QVQLVESGGGVVQPGRSLRLSCAASGFTFSSYGMHWVRQAPGKGLEWVAVISYDGSNKYYADSVKGRFTI |
| | Amino Acid | SRDNSKNTLYLQMNSLRAEDTAVYYCARSGGQTHRRSMDVWGQGTTVTVSS |
| | Sequence | |
| 486 | BIIB-12-1297_VH | CAGGTGCAGCTGGTGGAGTCTGGGGGAGGCGTGGTCCAGCCTGGGAGGTCCCTGAGACTCTCCTGTGCAG |
| | Nucleic Acid | CGTCTGGATTCACCTTCAGTAGCTATGGCATGCACTGGGTCCGCCAGGCTCCAGGCAAGGGGCTGGAGTG |
| | Sequence | GGTGGCAGTTATATCGTATGATGGAAGTAATAAATACTATGCAGACTCCGTGAAGGGCCGATTCACCATC |
| | | TCCAGAGACAATTCCAAGAACACGCTGTATCTGCAAATGAACAGCCTGAGAGCCGAGGACACGGCGGTGT |
| | | ACTACTGCGCCAGATCAGGCGGACAAACACACAGGAGGTCAATGGACGTATGGGGCCAGGGAACAACTGT |
| | | CACCGTCTCCTCA |
| 487 | BIIB-12-1298_VH | QVQLVESGGGVVQPGRSLRLSCAASGFTFSSYGMHWVRQAPGKGLEWVAVISYDGSNKYYADSVKGRFTI |
| | Amino Acid | SRDNSKNTLYLQMNSLRAEDTAVYYCAKGGSDRRVGSWGQGTLVTVSS |
| | Sequence | |
| 488 | BIIB-12-1298_VH | CAGGTGCAGCTGGTGGAGTCTGGGGGAGGCGTGGTCCAGCCTGGGAGGTCCCTGAGACTCTCCTGTGCAG |
| | Nucleic Acid | CGTCTGGATTCACCTTCAGTAGCTATGGCATGCACTGGGTCCGCCAGGCTCCAGGCAAGGGGCTGGAGTG |
| | Sequence | GGTGGCAGTTATATCGTATGATGGAAGTAATAAATACTATGCAGACTCCGTGAAGGGCCGATTCACCATC |
| | | TCCAGAGACAATTCCAAGAACACGCTGTATCTGCAAATGAACAGCCTGAGAGCCGAGGACACGGCGGTGT |
| | | ACTACTGCGCCAAGGGAGGTTCTGACCGCAGAGTGGGCAGTTGGGGACAGGGTACATTGGTCACCGTCTC |
| | | CTCA |
| 489 | BIIB-12-1299_VH | QVQLVESGGGVVQPGRSLRLSCAASGFTFSSYGMHWVRQAPGKGLEWVAVISYDGSNKYYADSVKGRFTI |
| | Amino Acid | SRDNSKNTLYLQMNSLRAEDTAVYYCARGGSRRAYVYWGQGTLVTVSS |
| | Sequence | |
| 490 | BIIB-12-1299_VH | CAGGTGCAGCTGGTGGAGTCTGGGGGAGGCGTGGTCCAGCCTGGGAGGTCCCTGAGACTCTCCTGTGCAG |
| | Nucleic Acid | CGTCTGGATTCACCTTCAGTAGCTATGGCATGCACTGGGTCCGCCAGGCTCCAGGCAAGGGGCTGGAGTG |
| | Sequence | GGTGGCAGTTATATCGTATGATGGAAGTAATAAATACTATGCAGACTCCGTGAAGGGCCGATTCACCATC |
| | | TCCAGAGACAATTCCAAGAACACGCTGTATCTGCAAATGAACAGCCTGAGAGCCGAGGACACGGCGGTGT |
| | | ACTACTGCGCCAGAGGCGGTTCTAGAAGGGCCTACGTTTATTGGGGACAGGGTACATTGGTCACCGTCTC |
| | | CTCA |
| 491 | BIIB-12-1300_VH | QVQLVESGGGVVQPGRSLRLSCAASGFTFSSYGMHWVRQAPGKGLEWVAVISYDGSNKYYADSVKGRFTI |
| | Amino Acid | SRDNSKNTLYLQMNSLRAEDTAVYYCARGSKYLHAWGQGTLVTVSS |
| | Sequence | |
| 492 | BIIB-12-1300_VH | AGGTGCAGCTGGTGGAGTCTGGGGGAGGCGTGGTCCAGCCTGGGAGGTCCCTGAGACTCTCCTGTGCAGC |
| | Nucleic Acid | GTCTGGATTCACCTTCAGTAGCTATGGCATGCACTGGGTCCGCCAGGCTCCAGGCAAGGGGCTGGAGTGG |
| | Sequence | GTGGCAGTTATATCGTATGATGGAAGTAATAAATACTATGCAGACTCCGTGAAGGGCCGATTCACCATCT |
| | | CCAGAGACAATTCCAAGAACACGCTGTATCTGCAAATGAACAGCCTGAGAGCCGAGGACACGGCGGTGTA |
| | | CTACTGCGCCAGAGGTTCTAAATACCTCCACGCATGGGGACAGGGTACATTGGTCACCGTCTCCTCA |
| 493 | BIIB-12-1301_VH | QVQLVESGGGVVQPGRSLRLSCAASGFTFSSYGMHWVRQAPGKGLEWVAVISYDGSNKYYADSVKGRFTI |
| | Amino Acid | SRDNSKNTLYLQMNSLRAEDTAVYYCARTGNYGRGMPYWGQGTLVTVSS |
| | Sequence | |
| 494 | BIIB-12-1301_VH | CAGGTGCAGCTGGTGGAGTCTGGGGGAGGCGTGGTCCAGCCTGGGAGGTCCCTGAGACTCTCCTGTGCAG |
| | Nucleic Acid | CGTCTGGATTCACCTTCAGTAGCTATGGCATGCACTGGGTCCGCCAGGCTCCAGGCAAGGGGCTGGAGTG |
| | Sequence | GGTGGCAGTTATATCGTATGATGGAAGTAATAAATACTATGCAGACTCCGTGAAGGGCCGATTCACCATC |
| | | TCCAGAGACAATTCCAAGAACACGCTGTATCTGCAAATGAACAGCCTGAGAGCCGAGGACACGGCGGTGT |
| | | ACTACTGCGCCAGAACTGGAAACTACGGAAGGGGAATGCCATACTGGGGACAGGGTACATTGGTCACCGT |
| | | CTCCTCA |
| 495 | BIIB-12-1302_VH | QVQLVQSGAEVKKPGASVKVSCKASGYTFTNYGISWVRQAPGQGLEWMGWISAYNGNTNYAQKLQGRVTM |
| | Amino Acid | TTDTSTSTAYMELRSLRSDDTAVYYCARARSDWRAFDIWGQGTMVTVSS |
| | Sequence | |
| 496 | BIIB-12-1302_VH | CAGGTTCAGCTGGTGCAGTCTGGAGCTGAGGTGAAGAAGCCTGGGGCCTCAGTGAAGGTCTCCTGCAAGG |
| | Nucleic Acid | CTTCTGGTTACACCTTTACCAACTATGGTATCAGCTGGGTGCGACAGGCCCCTGGACAAGGGCTTGAGTG |
| | Sequence | GATGGGATGGATCAGCGCTTACAATGGTAACACAAACTATGCACAGAAGCTCCAGGGCAGAGTCACCATG |
| | | ACCACAGACACATCCACGAGCACAGCCTACATGGAGCTGAGGAGCCTGAGATCTGACGACACGGCGGTGT |
| | | ACTACTGCGCAAGGGCTAGAAGTGACTGGAGAGCCTTCGATATATGGGGTCAGGGTACAATGGTCACCGT |
| | | CTCCTCA |
| 497 | BIIB-12-1303_VH | QVQLVESGGGVVQPGRSLRLSCAASGFTFSSYGMHWVRQAPGKGLEWVAVISYDGSNKYYADSVKGRFTI |
| | Amino Acid | SRDNSKNTLYLQMNSLRAEDTAVYYCARGPTSRLFQHWGQGTLVTVS |
| | Sequence | |
| 498 | BIIB-12-1303_VH | CAGGTGCAGCTGGTGGAGTCTGGGGGAGGCGTGGTCCAGCCTGGGAGGTCCCTGAGACTCTCCTGTGCAG |
| | Nucleic Acid | CGTCTGGATTCACCTTCAGTAGCTATGGCATGCACTGGGTCCGCCAGGCTCCAGGCAAGGGGCTGGAGTG |
| | Sequence | GGTGGCAGTTATATCGTATGATGGAAGTAATAAATACTATGCAGACTCCGTGAAGGGCCGATTCACCATC |
| | | TCCAGAGACAATTCCAAGAACACGCTGTATCTGCAAATGAACAGCCTGAGAGCCGAGGACACGGCGGTGT |
| | | ACTACTGCGCCAGAGGACCCACTAGTAGGTTATTCCAACACTGGGGACAGGGTACATTGGTCACCGTCTC |
| | | CTCA |
| 499 | BIIB-12-1304_VH | QVQLVESGGGVVQPGRSLRLSCAASGFTFSSYGMHWVRQAPGKGLEWVAVISYDGSNKYYADSVKGRFTI |
| | Amino Acid | SRDNSKNTLYLQMNSLRAEDTAVYYCAKGPGSRRFDIWGQGTMVTVSS |
| | Sequence | |
| 500 | BIIB-12-1304_VH | CAGGTGCAGCTGGTGGAGTCTGGGGGAGGCGTGGTCCAGCCTGGGAGGTCCCTGAGACTCTCCTGTGCAG |
| | Nucleic Acid | CGTCTGGATTCACCTTCAGTAGCTATGGCATGCACTGGGTCCGCCAGGCTCCAGGCAAGGGGCTGGAGTG |
| | Sequence | GGTGGCAGTTATATCGTATGATGGAAGTAATAAATACTATGCAGACTCCGTGAAGGGCCGATTCACCATC |
| | | TCCAGAGACAATTCCAAGAACACGCTGTATCTGCAAATGAACAGCCTGAGAGCCGAGGACACGGCGGTGT |
| | | ACTACTGCGCCAAGGGGCCTGGAAGTAGGAGGTTCGACATATGGGGTCAGGGTACAATGGTCACCGTCTC |
| | | CTCA |
| 501 | BIIB-12-1305_VH | QVQLVESGGGVVQPGRSLRLSCAASGFTFSSYGMHWVRQAPGKGLEWVAVISYDGSNKYYADSVKGRFTI |
| | Amino Acid | SRDNSKNTLYLQMNSLRAEDTAVYYCAKLGGRWSSDFQHWGQGTLVTVSS |
| | Sequence | |
| 502 | BIIB-12-1305_VH | CAGGTGCAGCTGGTGGAGTCTGGGGGAGGCGTGGTCCAGCCTGGGAGGTCCCTGAGACTCTCCTGTGCAG |
| | Nucleic Acid | CGTCTGGATTCACCTTCAGTAGCTATGGCATGCACTGGGTCCGCCAGGCTCCAGGCAAGGGGCTGGAGTG |
| | Sequence | GGTGGCAGTTATATCGTATGATGGAAGTAATAAATACTATGCAGACTCCGTGAAGGGCCGATTCACCATC |
| | | TCCAGAGACAATTCCAAGAACACGCTGTATCTGCAAATGAACAGCCTGAGAGCCGAGGACACGGCGGTGT |
| | | ACTACTGCGCCAAGCTAGGCGGAAGATGGAGTTCTGACTTCCAACACTGGGGACAGGGTACATTGGTCAC |
| | | CGTCTCCTCA |
| 503 | BIIB-12-1306_VH | QVQLQESGPGLVKPSQTLSLTCTVSGGSISSGGYYWSWIRQHPGKGLEWIGSIYYSGSTYYNPSLKSRVT |
| | Amino Acid | ISVDTSKNQFSLKLSSVTAADTAVYYCARGAGGSAPWGQGTLVTVSS |
| | Sequence | |
| 504 | BIIB-12-1306_VH | CAGGTGCAGCTGCAGGAGTCGGGCCCAGGACTGGTGAAGCCTTCACAGACCCTGTCCCTCACCTGTACTG |
| | Nucleic Acid | TCTCTGGTGGCTCCATCAGCAGTGGTGGTTACTACTGGAGCTGGATCCGCCAGCACCCAGGGAAGGGCCT |
| | Sequence | GGAGTGGATTGGGTCAATCTATTACAGTGGGAGCACCTACTACAACCCGTCCCTCAAGAGTCGAGTTACC |
| | | ATATCAGTAGACACGTCTAAGAACCAGTTCTCCCTGAAGCTGAGTTCTGTGACCGCCGCAGACACGGCGG |
| | | TGTACTACTGCGCCAGAGGTGCCGGAGGATCTGCCCCATGGGGACAGGGTACATTGGTCACCGTCTCCTC |
| | | A |
| 505 | BIIB-12-1307_VH | QVQLQESGPGLVKPSETLSLTCAVSGYSISSGYYWAWIRQPPGKGLEWIGSIYHSGSTYYNPSLKSRVTI |
| | Amino Acid | SVDTSKNQFSLKLSSVTAADTAVYYCARGPLPRSRGLAFDIWGQGTMVTVSS |
| | Sequence | |
| 506 | BIIB-12-1307_VH | CAGGTGCAGCTGCAGGAGTCGGGCCCAGGACTGGTGAAGCCTTCGGAGACCCTGTCCCTCACCTGCGCTG |
| | Nucleic Acid | TCTCTGGTTACTCCATCAGCAGTGGTTACTACTGGGCTTGGATCCGGCAGCCCCCAGGGAAGGGGCTGGA |
| | Sequence | GTGGATTGGGAGTATCTATCATAGTGGGAGCACCTACTACAACCCGTCCCTCAAGAGTCGAGTCACCATA |
| | | TCAGTAGACACGTCCAAGAACCAGTTCTCCCTGAAGCTGAGTTCTGTGACCGCCGCAGACACGGCGGTGT |
| | | ACTACTGCGCCAGAGGTCCCTTGCCAAGATCTAGAGGCTTAGCCTTCGATATCTGGGGTCAGGGTACAAT |
| | | GGTCACCGTCTCCTCA |
| 507 | BIIB-12-1308_VH | QVQLVESGGGVVQPGRSLRLSRAASGFTFSSYGMHWVRQAPGKGLEWVAVISYDGSNKYYADSVKGRFTI |
| | Amino Acid | SRDNSKNTLYLQMNSLRAEDTAVYYCARGPRALGTAFDIWGQGTMVTVSS |
| | Sequence | |
| 508 | BIIB-12-1308_VH | CAGGTGCAGCTGGTGGAGTCTGGGGGAGGCGTGGTCCAGCCTGGGAGGTCCCTGAGACTATCCAGAGCAG |
| | Nucleic Acid | CGTCTGGATTCACCTTCAGTAGCTATGGCATGCACTGGGTCCGCCAGGCTCCAGGCAAGGGGCTGGAGTG |
| | Sequence | GGTGGCAGTTATATCGTATGATGGAAGTAATAAATACTATGCAGACTCCGTGAAGGGCCGATTCACCATC |
| | | TCCAGAGACAATTCCAAGAACACGCTGTATCTGCAAATGAACAGCCTGAGAGCCGAGGACACGGCGGTGT |
| | | ACTACTGCGCCAGAGGACCAAGAGCATTGGGAACCGCATTCGACATATGGGGTCAGGGTACAATGGTCAC |
| | | CGTCTCCTCA |
| 509 | BIIB-12-1309_VH | QVQLVESGGGVVQPGRSLRLSCAASGFTFSSYGMHWVRQAPGKGLEWVAVISYDGSNKYYADSVKGRFTI |
| | Amino Acid | SRDNSKNTLYLQMNSLRAEDTAVYYCARGRYTSRYFQHWGQGTLVTVSS |
| | Sequence | |
| 510 | BIIB-12-1309_VH | CAGGTGCAGCTGGTGGAGTCTGGGGGAGGCGTGGTCCAGCCTGGGAGGTCCCTGAGACTCTCCTGTGCAG |
| | Nucleic Acid | CGTCTGGATTCACCTTCAGTAGCTATGGCATGCACTGGGTCCGCCAGGCTCCAGGCAAGGGGCTGGAGTG |
| | Sequence | GGTGGCAGTTATATCGTATGATGGAAGTAATAAATACTATGCAGACTCCGTGAAGGGCCGATTCACCATC |
| | | TCCAGAGACAATTCCAAGAACACGCTGTATCTGCAAATGAACAGCCTGAGAGCCGAGGACACGGCGGTGT |
| | | ACTACTGCGCCAGAGGCAGATACACAAGCAGATACTTCCAACACTGGGGACAGGGTACATTGGTCACCGT |
| | | CTCCTCA |
| 511 | BIIB-12-1310_VH | EVQLVESGGGLVKPGGSLRLSCAASGFTFSSYSMNWVRQAPGKGLEWVSSISSSSSYIYYADSVKGRFTI |
| | Amino Acid | SRDNAKNSLYLQMNSLRAEDTAVYYCARLGGYGSSQRYFDLWGRGTLVTVSS |
| | Sequence | |
| 512 | BIIB-12-1310_VH | GAGGTGCAGCTGGTGGAGTCTGGGGGAGGCCTGGTCAAGCCTGGGGGGTCCCTGAGACTCTCCTGTGCAG |
| | Nucleic Acid | CCTCTGGATTCACCTTCAGTAGCTATAGCATGAACTGGGTCCGCCAGGCTCCAGGGAAGGGGCTGGAGTG |
| | Sequence | GGTCTCATCCATTAGTAGTAGTAGTAGTTACATATACTACGCAGACTCAGTGAAGGGCCGATTCACCATC |
| | | TCCAGAGACAACGCCAAGAACTCACTGTATCTGCAAATGAACAGCCTGAGAGCCGAGGACACGGCGGTGT |
| | | ACTACTGCGCCAGATTGGGCGGATACGGAAGCTCGCAGCGATACTTCGACCTATGGGGGAGAGGTACCTT |
| | | GGTCACCGTCTCCTCA |
| 513 | BIIB-12-1311_VH | QVQLVESGGGVVQPGRSLRLSCAASGFTFSSYGMHWVRQAPGKGLEWVAVISYDGSNKYYADSVKGRFTI |
| | Amino Acid | SRDNSKNTLYLQMNSLRAEDTAVYYCAKGRHYWAVWGQGTLVTVSS |
| | Sequence | |
| 514 | BIIB-12-1311_VH | CAGGTGCAGCTGGTGGAGTCTGGGGGAGGCGTGGTCCAGCCTGGGAGGTCCCTGAGACTCTCCTGTGCAG |
| | Nucleic Acid | CGTCTGGATTCACCTTCAGTAGCTATGGCATGCACTGGGTCCGCCAGGCTCCAGGCAAGGGGCTGGAGTG |
| | Sequence | GGTGGCAGTTATATCGTATGATGGAAGTAATAAATACTATGCAGACTCCGTGAAGGGCCGATTCACCATC |
| | | TCCAGAGACAATTCCAAGAACACGCTGTATCTGCAAATGAACAGCCTGAGAGCCGAGGACACGGCGGTGT |
| | | ACTACTGCGCCAAGGGCAGACACTACTGGGCCGTCTGGGGACAGGGTACATTGGTCACCGTCTCCTCA |
| 515 | BIIB-12-1312_VH | QVQLVESGGGVVQPGRSLRLSCAASGFTFSSYGMHWVRQAPGKGLEWVAVISYDGSNKYYADSVKGRFTI |
| | Amino Acid | SRDNSKNTLYLQMNSLRAEDTAVYYCAKGMGHWIDYWGQGTLVTVSS |
| | Sequence | |
| 516 | BIIB-12-1312_VH | CAGGTGCAGCTGGTGGAGTCTGGGGGAGGCGTGGTCCAGCCTGGGAGGTCCCTGAGACTCTCCTGTGCAG |
| | Nucleic Acid | CGTCTGGATTCACCTTCAGTAGCTATGGCATGCACTGGGTCCGCCAGGCTCCAGGCAAGGGGCTGGAGTG |
| | Sequence | GGTGGCAGTTATATCGTATGATGGAAGTAATAAATACTATGCAGACTCCGTGAAGGGCCGATTCACCATC |
| | | TCCAGAGACAATTCCAAGAACACGCTGTATCTGCAAATGAACAGCCTGAGAGCCGAGGACACGGCGGTGT |
| | | ACTACTGCGCCAAGGGAATGGGACACTGGATTGACTACTGGGGACAGGGTACATTGGTCACCGTCTCCTC |
| | | A |
| 517 | BIIB-12-1313_VH | QVQLVESGGGVVQPGRSLRLSCAASGFTFSSYGMHWVRQAPGKGLEWVAVISYDGSNKYYADSVKGRFTI |
| | Amino Acid | SRDNSKNTLYLQMNSLRAEDTAVYYCAKGTGWWRYWGQGTLVTVSS |
| | Sequence | |
| 518 | BIIB-12-1313_VH | CAGGTGCAGCTGGTGGAGTCTGGGGGAGGCGTGGTCCAGCCTGGGAGGTCCCTGAGACTCTCCTGTGCAG |
| | Nucleic Acid | CGTCTGGATTCACCTTCAGTAGCTATGGCATGCACTGGGTCCGCCAGGCTCCAGGCAAGGGGCTGGAGTG |
| | Sequence | GGTGGCAGTTATATCGTATGATGGAAGTAATAAATACTATGCAGACTCCGTGAAGGGCCGATTCACCATC |
| | | TCCAGAGACAATTCCAAGAACACGCTGTATCTGCAAATGAACAGCCTGAGAGCCGAGGACACGGCGGTGT |
| | | ACTACTGCGCCAAGGGAACCGGCTGGTGGCGATACTGGGGACAGGGTACATTGGTCACCGTCTCCTCA |
| 519 | BIIB-12-1314_VH | QVQLVESGGGVVQPGRSLRLSCAASGFTFSSYGMHWVRQAPGKGLEWVAVISYDGSNKYYADSVKGRFTI |
| | Amino Acid | SRDNSKNTLYLQMNSLRAEDTAVYYCAKGTRWAGNWGQGTLVTVSS |
| | Sequence | |
| 520 | BIIB-12-1314_VH | CAGGTGCAGCTGGTGGAGTCTGGGGGAGGCGTGGTCCAGCCTGGGAGGTCCCTGAGACTCTCCTGTGCAG |
| | Nucleic Acid | CGTCTGGATTCACCTTCAGTAGCTATGGCATGCACTGGGTCCGCCAGGCTCCAGGCAAGGGGCTGGAGTG |
| | Sequence | GGTGGCAGTTATATCGTATGATGGAAGTAATAAATACTATGCAGACTCCGTGAAGGGCCGATTCACCATC |
| | | TCCAGAGACAATTCCAAGAACACGCTGTATCTGCAAATGAACAGCCTGAGAGCCGAGGACACGGCGGTGT |
| | | ACTACTGCGCCAAGGGAACTAGATGGGCAGGGAATTGGGGACAGGGTACATTGGTCACCGTCTCCTCA |
| 521 | BIIB-12-1315_VH | QVQLVQSGAEVKKPGASVKVSCKASGYTFTSYYMVWVRQAPGQGLEWMGIINPSGGSTSYAQKFQGRVTM |
| | Amino Acid | TRDTSTSTVYMELSSLRSEDTAVYYCARGRPSSKRVTYFDYWGQGTLVTVSS |
| | Sequence | |
| 522 | BIIB-12-1315_VH | CAGGTGCAGCTGGTGCAGTCTGGGGCTGAGGTGAAGAAGCCTGGGGCCTCAGTGAAGGTTTCCTGCAAGG |
| | Nucleic Acid | CATCTGGATACACCTTCACCAGCTACTATATGGTCTGGGTGCGACAGGCCCCTGGACAAGGGCTTGAGTG |
| | Sequence | GATGGGAATAATCAACCCTAGTGGTGGTAGCACAAGCTACGCACAGAAGTTCCAGGGCAGAGTCACCATG |
| | | ACCAGGGACACGTCCACGAGCACAGTCTACATGGAGCTGAGCAGCCTGAGATCTGAGGACACGGCGGTGT |
| | | ACTACTGCGCCAGAGGAAGGCCTAGCAGCAAAAGGGTTACATACTTCGACTACTGGGGACAGGGTACATT |
| | | GGTCACCGTCTCCTCA |
| 523 | BIIB-12-1316_VH | QVQLVESGGGVVQPGRSLRLSCAASGFTFSSYGMHWVRQAPGKGLEWVAVISYDGSNKYYADSVKGRFTI |
| | Amino Acid | SRDNSKNTLYLQMNSLRAEDTAVYYCAKSGQYRAFDIWGQGTMVTVSS |
| | Sequence | |
| 524 | BIIB-12-1316_VH | CAGGTGCAGCTGGTGGAGTCTGGGGGAGGCGTGGTCCAGCCTGGGAGGTCCCTGAGACTCTCCTGTGCAG |
| | Nucleic Acid | CGTCTGGATTCACCTTCAGTAGCTATGGCATGCACTGGGTCCGCCAGGCTCCAGGCAAGGGGCTGGAGTG |
| | Sequence | GGTGGCAGTTATATCGTATGATGGAAGTAATAAATACTATGCAGACTCCGTGAAGGGCCGATTCACCATC |
| | | TCCAGAGACAATTCCAAGAACACGCTGTATCTGCAAATGAACAGCCTGAGAGCCGAGGACACGGCGGTGT |
| | | ACTACTGCGCCAAGTCTGGACAGTATAGAGCCTTTGATATTTGGGGTCAGGGTACAATGGTCACCGTCTC |
| | | CTCA |
| 525 | BIIB-12-1317_VH | QVQLVESGGGVVQPGRSLRLSCAASGFTFSSYGMHWVRQAPGKGLEWVAVISYDGSNKYYADSVKGRFTI |
| | Amino Acid | SRDNSKNTLYLQMNSLRAEDTAVYYCARGVGGHDTRWGQGTLVTVSS |
| | Sequence | |
| 526 | BIIB-12-1317_VH | CAGGTGCAGCTGGTGGAGTCTGGGGGAGGCGTGGTCCAGCCTGGGAGGTCCCTGAGACTCTCCTGTGCAG |
| | Nucleic Acid | CGTCTGGATTCACCTTCAGTAGCTATGGCATGCACTGGGTCCGCCAGGCTCCAGGCAAGGGGCTGGAGTG |
| | Sequence | GGTGGCAGTTATATCGTATGATGGAAGTAATAAATACTATGCAGACTCCGTGAAGGGCCGATTCACCATC |
| | | TCCAGAGACAATTCCAAGAACACGCTGTATCTGCAAATGAACAGCCTGAGAGCCGAGGACACGGCGGTGT |
| | | ACTACTGCGCCAGAGGCGTAGGAGGACACGACACGAGATGGGGACAGGGTACATTGGTCACCGTCTCCTC |
| | | A |
| 527 | BIIB-12-1318_VH | QVQLVESGGGVVQPGRSLRLSCAASGFTFSSYGMHWVRQAPGKGLEWVAVISYDGSNKYYADSVKGRFTI |
| | Amino Acid | SRDNSKNTLYLQMNSLRAEDTAVYYCARKGDYRSGSYSGRAFGIWGQGTMVTVSS |
| | Sequence | |
| 528 | BIIB-12-1318_VH | CAGGTGCAGCTGGTGGAGTCTGGGGGAGGCGTGGTCCAGCCTGGGAGGTCCCTGAGACTCTCCTGTGCAG |
| | Nucleic Acid | CGTCTGGATTCACCTTCAGTAGCTATGGCATGCACTGGGTCCGCCAGGCTCCAGGCAAGGGGCTGGAGTG |
| | Sequence | GGTGGCAGTTATATCGTATGATGGAAGTAATAAATACTATGCAGACTCCGTGAAGGGCCGATTCACCATC |
| | | TCCAGAGACAATTCCAAGAACACGCTGTATCTGCAAATGAACAGCCTGAGAGCCGAGGACACGGCGGTGT |
| | | ACTACTGCGCCAGAAAGGGAGACTACAGGAGCGGAAGCTACTCCGGAAGAGCCTTCGGTATATGGGGTCA |
| | | GGGTACAATGGTCACCGTCTCCTCA |
| 529 | BIIB-12-1319_VH | QVQLVESGGGVVQPGRSLRLSCAASGFTFSSYGMHWVRQAPGKGLEWVAVISYDGSNKYYADSVKGRFTI |
| | Amino Acid | SRDNSKNTLYLQMNSLRAEDTAVYYCARTGYHRSVYYWGQGTLVTVSS |
| | Sequence | |
| 530 | BIIB-12-1319_VH | CAGGTGCAGCTGGTGGAGTCTGGGGGAGGCGTGGTCCAGCCTGGGAGGTCCCTGAGACTCTCCTGTGCAG |
| | Nucleic Acid | CGTCTGGATTCACCTTCAGTAGCTATGGCATGCACTGGGTCCGCCAGGCTCCAGGCAAGGGGCTGGAGTG |
| | Sequence | GGTGGCAGTTATATCGTATGATGGAAGTAATAAATACTATGCAGACTCCGTGAAGGGCCGATTCACCATC |
| | | TCCAGAGACAATTCCAAGAACACGCTGTATCTGCAAATGAACAGCCTGAGAGCCGAGGACACGGCGGTGT |
| | | ACTACTGCGCCAGAACTGGATACCACAGAAGTGTATACTATTGGGGACAGGGTACATTGGTCACCGTCTC |
| | | CTCA |
| 531 | BIIB-12-1322_VH | QVQLVQSGAEVKKPGASVKVSCKASGYTFTSYYIHWVRQAPGQGLEWMGIINPSGGSTSYAQKFQGRVTM |
| | Amino Acid | TRDTSTSTVYMELSSLRSEDTAVYYCARSRQRHRGDWYFDLWGRGTLVTVSS |
| | Sequence | |
| 532 | BIIB-12-1322_VH | CAGGTGCAGCTGGTGCAGTCTGGGGCTGAGGTGAAGAAGCCTGGGGCCTCAGTGAAGGTTTCCTGCAAGG |
| | Nucleic Acid | CATCTGGATACACCTTCACCAGCTACTATATCCACTGGGTGCGACAGGCCCCTGGACAAGGGCTTGAGTG |
| | Sequence | GATGGGAATAATCAACCCTAGTGGTGGTAGCACAAGCTACGCACAGAAGTTCCAGGGCAGAGTCACCATG |
| | | ACCAGGGACACGTCCACGAGCACAGTCTACATGGAGCTGAGCAGCCTGAGATCTGAGGACACGGCGGTGT |
| | | ACTACTGCGCTAGATCAAGACAAAGACACAGAGGTGATTGGTACTTCGATTTATGGGGGAGAGGTACCTT |
| | | GGTCACCGTCTCCTCA |
| 533 | BIIB-12-1323_VH | QVQLVQSGAEVKKPGASVKVSCKASGYTFTSYYIHWVRQAPGQGLEWMGIINPSGGSTSYAQKFQGRVTM |
| | Amino Acid | TRDTSTSTVYMELSSLRSEDTAVYYCARGRRFPRGLDYWGQGTLVTVSS |
| | Sequence | |
| 534 | BIIB-12-1323_VH | CAGGTGCAGCTGGTGCAGTCTGGGGCTGAGGTGAAGAAGCCTGGGGCCTCAGTGAAGGTTTCCTGCAAGG |
| | Nucleic Acid | CATCTGGATACACCTTCACCAGCTACTATATCCACTGGGTGCGACAGGCCCCTGGACAAGGGCTTGAGTG |
| | Sequence | GATGGGAATAATCAACCCTAGTGGTGGTAGCACAAGCTACGCACAGAAGTTCCAGGGCAGAGTCACCATG |
| | | ACCAGGGACACGTCCACGAGCACAGTCTACATGGAGCTGAGCAGCCTGAGATCTGAGGACACGGCGGTGT |
| | | ACTACTGCGCCAGAGGCAGAAGATTCCCTAGAGGCTTAGATTACTGGGGACAGGGTACATTGGTCACCGT |
| | | CTCCTCA |
| 535 | BIIB-12-1324_VH | QVQLVQSGAEVKKPGASVKVSCKASGYTFTSYYMVWVRQAPGQGLEWMGIINPSGGSTSYAQKFQGRVTM |
| | Amino Acid | TRDTSTSTVYMELSSLRSEDTAVYYCARLPRYSKRGLDVWGQGTMVTVSS |
| | Sequence | |
| 536 | BIIB-12-1324_VH | CAGGTGCAGCTGGTGCAGTCTGGGGCTGAGGTGAAGAAGCCTGGGGCCTCAGTGAAGGTTTCCTGCAAGG |
| | Nucleic Acid | CATCTGGATACACCTTCACCAGCTACTATATGGTCTGGGTGCGACAGGCCCCTGGACAAGGGCTTGAGTG |
| | Sequence | GATGGGAATAATCAACCCTAGTGGTGGTAGCACAAGCTACGCACAGAAGTTCCAGGGCAGAGTCACCATG |
| | | ACCAGGGACACGTCCACGAGCACAGTCTACATGGAGCTGAGCAGCCTGAGATCTGAGGACACGGCGGTGT |
| | | ACTACTGCGCCAGACTTCCTAGATACAGCAAAAGAGGTCTAGACGTATGGGGTCAGGGTACAATGGTCAC |
| | | CGTCTCCTCA |
| 537 | BIIB-12-1325_VH | QVQLVQSGAEVKKPGASVKVSCKASGYTFTSYYMVWVRQAPGQGLEWMGIINPSGGSTSYAQKFQGRVTM |
| | Amino Acid | TRDTSTSTVYMELSSLRSEDTAVYYCARGGRYMLDPWGQGTLVTVSS |
| | Sequence | |
| 538 | BIIB-12-1325_VH | CAGGTGCAGCTGGTGCAGTCTGGGGCTGAGGTGAAGAAGCCTGGGGCCTCAGTGAAGGTTTCCTGCAAGG |
| | Nucleic Acid | CATCTGGATACACCTTCACCAGCTACTATATGGTCTGGGTGCGACAGGCCCCTGGACAAGGGCTTGAGTG |
| | Sequence | GATGGGAATAATCAACCCTAGTGGTGGTAGCACAAGCTACGCACAGAAGTTCCAGGGCAGAGTCACCATG |
| | | ACCAGGGACACGTCCACGAGCACAGTCTACATGGAGCTGAGCAGCCTGAGATCTGAGGACACGGCGGTGT |
| | | ACTACTGCGCCAGAGGAGGTAGATATATGTTAGACCCATGGGGACAGGGTACATTGGTCACCGTCTCCTC |
| | | A |
| 539 | BIIB-12-1326_VH | EVQLLESGGGLVQPGGSLRLSCAASGFTFSSYAMSWVRQAPGKGLEWVSTISGSGGSTYYADSVKGRFTI |
| | Amino Acid | SRDNSKNTLYLQMNSLRAEDTAVYYCAKGPLYRRYGYGMDVWGQGTTVTVSS |
| | Sequence | |
| 540 | BIIB-12-1326_VH | GAGGTGCAGCTGTTGGAGTCTGGGGGAGGCTTGGTACAGCCTGGGGGGTCCCTGAGACTCTCCTGTGCAG |
| | Nucleic Acid | CCTCTGGATTCACCTTTAGCAGCTATGCCATGAGCTGGGTCCGCCAGGCTCCAGGGAAGGGGCTGGAGTG |
| | Sequence | GGTCTCAACCATTAGTGGTAGTGGTGGTAGCACATACTACGCAGACTCCGTGAAGGGCCGGTTCACCATC |
| | | TCCAGAGACAATTCCAAGAACACGCTGTATCTGCAAATGAACAGCCTGAGAGCCGAGGACACGGCGGTGT |
| | | ACTACTGCGCCAAGGGGCCGTTGTACCGCAGATACGGCTACGGTATGGACGTTTGGGGCCAGGGAACAAC |
| | | TGTCACCGTCTCCTCA |
| 541 | BIIB-12-1327_VH | QVQLVESGGGVVQPGRSLRLSCAASGFTFSSYGMHWVRQAPGKGLEWVAVISYDGSNKYYADSVKGRFTI |
| | Amino Acid | SRDNSKNTLYLQMNSLRAEDTAVYYCAKLGLARGGGYGMDVWGQGTTVTVSS |
| | Sequence | |
| 542 | BIIB-12-1327_VH | CAGGTGCAGCTGGTGGAGTCTGGGGGAGGCGTGGTCCAGCCTGGGAGGTCCCTGAGACTCTCCTGTGCAG |
| | Nucleic Acid | CGTCTGGATTCACCTTCAGTAGCTATGGCATGCACTGGGTCCGCCAGGCTCCAGGCAAGGGGCTGGAGTG |
| | Sequence | GGTGGCAGTTATATCGTATGATGGAAGTAATAAATACTATGCAGACTCCGTGAAGGGCCGATTCACCATC |
| | | TCCAGAGACAATTCCAAGAACACGCTGTATCTGCAAATGAACAGCCTGAGAGCCGAGGACACGGCGGTGT |
| | | ACTACTGCGCCAAGTTAGGATTGGCAAGAGGAGGTGGATACGGAATGGACGTATGGGGCCAGGGAACAAC |
| | | TGTCACCGTCTCCTCA |
| 543 | BIIB-12-1328_VH | QLQLQESGPGLVKPSETLSLTCTVSGGSISSSSYYWGWIRQPPGKGLEWIGSIYYSGSTYYNPSLKSRVT |
| | Amino Acid | ISVDTSKNQFSLKLSSVTAADTAVYYCARDPAYYSGHDYYYYGMDVWGQGTTVTVSS |
| | Sequence | |
| 544 | BIIB-12-1328_VH | CAGCTGCAGCTGCAGGAGTCGGGCCCAGGACTGGTGAAGCCTTCGGAGACCCTGTCCCTCACCTGCACTG |
| | Nucleic Acid | TCTCTGGTGGCTCCATCAGCAGTAGTAGTTACTACTGGGGCTGGATCCGCCAGCCCCCAGGGAAGGGGCT |
| | Sequence | GGAGTGGATTGGGAGTATCTATTATAGTGGGAGCACCTACTACAACCCGTCCCTCAAGAGTCGAGTCACC |
| | | ATATCCGTAGACACGTCCAAGAACCAGTTCTCCCTGAAGCTGAGTTCTGTGACCGCCGCAGACACGGCGG |
| | | TGTACTACTGCGCCAGAGATCCCGCTTACTACTCAGGTCACGACTATTACTATTATGGAATGGATGTATG |
| | | GGGCCAGGGAACAACTGTCACCGTCTCCTCA |
| 545 | BIIB-12-1329_VH | QVQLVESGGGVVQPGRSLRLSCAASGFTFSSYGMHWVRQAPGKGLEWVAVISYDGSNKYYADSVKGRFTI |
| | Amino Acid | SRDNSKNTLYLQMNSLRAEDTAVYYCARGGAGSRYFQHWGQGTLVTVSS |
| | Sequence | |
| 546 | BIIB-12-1329_VH | CAGGTGCAGCTGGTGGAGTCTGGGGGAGGCGTGGTCCAGCCTGGGAGGTCCCTGAGACTCTCCTGTGCAG |
| | Nucleic Acid | CGTCTGGATTCACCTTCAGTAGCTATGGCATGCACTGGGTCCGCCAGGCTCCAGGCAAGGGGCTGGAGTG |
| | Sequence | GGTGGCAGTTATATCGTATGATGGAAGTAATAAATACTATGCAGACTCCGTGAAGGGCCGATTCACCATC |
| | | TCCAGAGACAATTCCAAGAACACGCTGTATCTGCAAATGAACAGCCTGAGAGCCGAGGACACGGCGGTGT |
| | | ACTACTGCGCCAGAGGAGGTGCTGGATCAAGGTACTTCCAACACTGGGGACAGGGTACATTGGTCACCGT |
| | | CTCCTCA |
| 547 | BIIB-12-1330_VH | QVQLVESGGGVVQPGRSLRLSCAASGFTFSSYGMHWVRQAPGKGLEWVAVISYDGSNKYYADSVKGRFTI |
| | Amino Acid | SRDNSKNTLYLQMNSLRAEDTAVYYCAKGGSARWINIWGQGTTVTVSS |
| | Sequence | |
| 548 | BIIB-12-1330_VH | CAGGTGCAGCTGGTGGAGTCTGGGGGAGGCGTGGTCCAGCCTGGGAGGTCCCTGAGACTCTCCTGTGCAG |
| | Nucleic Acid | CGTCTGGATTCACCTTCAGTAGCTATGGCATGCACTGGGTCCGCCAGGCTCCAGGCAAGGGGCTGGAGTG |
| | Sequence | GGTGGCAGTTATATCGTATGATGGAAGTAATAAATACTATGCAGACTCCGTGAAGGGCCGATTCACCATC |
| | | TCCAGAGACAATTCCAAGAACACGCTGTATCTGCAAATGAACAGCCTGAGAGCCGAGGACACGGCGGTGT |
| | | ACTACTGCGCCAAGGGAGGTTCTGCAAGATGGATCAACATATGGGGTCAGGGAACAACTGTCACCGTCTC |
| | | CTCA |
| 549 | BIIB-12-1331_VH | QVQLVESGGGVVQPGRSLRLSCAASGFTFSSYGMHWVRQAPGKGLEWVAVISYDGSNKYYADSVKGRFTI |
| | Amino Acid | SRDNSKNTLYLQMNSLRAEDTAVYYCAKVPHHRGHDYWGQGTLVTVSS |
| | Sequence | |
| 550 | BIIB-12-1331_VH | CAGGTGCAGCTGGTGGAGTCTGGGGGAGGCGTGGTCCAGCCTGGGAGGTCCCTGAGACTCTCCTGTGCAG |
| | Nucleic Acid | CGTCTGGATTCACCTTCAGTAGCTATGGCATGCACTGGGTCCGCCAGGCTCCAGGCAAGGGGCTGGAGTG |
| | Sequence | GGTGGCAGTTATATCGTATGATGGAAGTAATAAATACTATGCAGACTCCGTGAAGGGCCGATTCACCATC |
| | | TCCAGAGACAATTCCAAGAACACGCTGTATCTGCAAATGAACAGCCTGAGAGCCGAGGACACGGCGGTGT |
| | | ACTACTGCGCCAAGGTACCTCACCACAGAGGTCACGATTACTGGGGACAGGGTACATTGGTCACCGTCTC |
| | | CTCA |
| 551 | BIIB-12-1332 VH | QVQLVQSGAEVKKPGASVKVSCKASGYTFTSYYMSWVRQAPGQGLEWMGIINPSGGSTSYAQKFQGRVTM |
| | Amino Acid | TRDTSTSTVYMELSSLRSEDTAVYYCARLGRKSRVFDIWGQGTMVTVSS |
| | Sequence | |
| 552 | BIIB-12-1332_VH | CAGGTGCAGCTGGTGCAGTCTGGGGCTGAGGTGAAGAAGCCTGGGGCCTCAGTGAAGGTTTCCTGCAAGG |
| | Nucleic Acid | CATCTGGATACACCTTCACCAGCTACTATATGTCATGGGTGCGACAGGCCCCTGGACAAGGGCTTGAGTG |
| | Sequence | GATGGGAATAATCAACCCTAGTGGTGGTAGCACAAGCTACGCACAGAAGTTCCAGGGCAGAGTCACCATG |
| | | ACCAGGGACACGTCCACGAGCACAGTCTACATGGAGCTGAGCAGCCTGAGATCTGAGGACACGGCGGTGT |
| | | ACTACTGCGCCAGATTGGGAAGGAAATCAAGGGTATTCGACATATGGGGTCAGGGTACAATGGTCACCGT |
| | | CTCCTCA |
| 553 | BIIB-12-1333_VH | QVQLVQSGAEVKKPGASVKVSCKASGYTFTSYYMVWVRQAPGQGLEWMGIINPSGGSTSYAQKFQGRVTM |
| | Amino Acid | TRDTSTSTVYMELSSLRSEDTAVYYCARVSRRDYPLAFDIWGQGTMVTVSS |
| | Sequence | |
| 554 | BIIB-12-1333_VH | CAGGTGCAGCTGGTGCAGTCTGGGGCTGAGGTGAAGAAGCCTGGGGCCTCAGTGAAGGTTTCCTGCAAGG |
| | Nucleic Acid | CATCTGGATACACCTTCACCAGCTACTATATGGTCTGGGTGCGACAGGCCCCTGGACAAGGGCTTGAGTG |
| | Sequence | GATGGGAATAATCAACCCTAGTGGTGGTAGCACAAGCTACGCACAGAAGTTCCAGGGCAGAGTCACCATG |
| | | ACCAGGGACACGTCCACGAGCACAGTCTACATGGAGCTGAGCAGCCTGAGATCTGAGGACACGGCGGTGT |
| | | ACTACTGCGCTAGAGTATCTAGAAGGGACTACCCATTAGCCTTCGATATCTGGGGTCAGGGTACAATGGT |
| | | CACCGTCTCCTCA |
| 555 | BIIB-12-1334_VH | QVQLVESGGGVVQPGRSLRLSCAASGFTFSSYGMHWVRQAPGKGLEWVAVISYDGSNKYYADSVKGRFTI |
| | Amino Acid | SRDNSKNTLYLQMNSLRAEDTAVYYCARVPRKQTGHVDYWGQGTLVTVSS |
| | Sequence | |
| 556 | BIIB-12-1334_VH | CAGGTGCAGCTGGTGGAGTCTGGGGGAGGCGTGGTCCAGCCTGGGAGGTCCCTGAGACTCTCCTGTGCAG |
| | Nucleic Acid | CGTCTGGATTCACCTTCAGTAGCTATGGCATGCACTGGGTCCGCCAGGCTCCAGGCAAGGGGCTGGAGTG |
| | Sequence | GGTGGCAGTTATATCGTATGATGGAAGTAATAAATACTATGCAGACTCCGTGAAGGGCCGATTCACCATC |
| | | TCCAGAGACAATTCCAAGAACACGCTGTATCTGCAAATGAACAGCCTGAGAGCCGAGGACACGGCGGTGT |
| | | TACTACTGCGCCAGAGTCCCTAGAAAGCAAACTGGTCACGTGGACTACGGGGACAGGGTACATTGGTCAC |
| | | CGTCTCCTCA |

Class VI Antibodies - VH Sequences

| | | |
|---|---|---|
| 557 | BIIB-12-894_VH | QLQLQESGPGLVKPSETLSLTCTVSGGSISSSSYYWGWIRQPPGKGLEWIGSIYYSGSTYYNPSLKSRVT |
| | Amino Acid | ISVDTSKNQFSLKLSSVTAADTAVYYCAREGAHSSMAGLDVWGQGTMVTVSS |
| | Sequence | |
| 558 | BIIB-12-894_VH | CAGCTGCAGCTGCAGGAGTCGGGCCCAGGACTGGTGAAGCCTTCGGAGACCCTGTCCCTCACCTGCACTG |
| | Nucleic Acid | TCTCTGGTGGCTCCATCAGCAGTAGTAGTTACTACTGGGGCTGGATCCGCCAGCCCCCAGGGAAGGGGCT |
| | Sequence | GGAGTGGATTGGGAGTATCTATTATAGTGGGAGCACCTACTACAACCCGTCCCTCAAGAGTCGAGTCACC |
| | | ATATCCGTAGACACGTCCAAGAACCAGTTCTCCCTGAAGCTGAGTTCTGTGACCGCCGCAGACACGGCGG |
| | | TGTACTACTGCGCCAGAGAAGGAGCTCACAGCAGCATGGCAGGGCTAGACGTATGGGGTCAGGGTACAAT |
| | | GGTCACCGTCTCCTCA |
| 559 | BIIB-12-925_VH | EVQLLESGGGLVQPGGSLRLSCAASGFTFSSYAMSWVRQAPGKGLEWVSAISGSGGSTYYADSVKGRFTI |
| | Amino Acid | SRDNSKNTLYLQMNSLRAEDTAVYYCAKGPRYYWYSWYFDLWGRGTLVTVSS |
| | Sequence | |
| 560 | BIIB-12-925_VH | GAGGTGCAGCTGTTGGAGTCTGGGGGAGGCTTGGTACAGCCTGGGGGGTCCCTGAGACTCTCCTGTGCAG |
| | Nucleic Acid | CCTCTGGATTCACCTTTAGCAGCTATGCCATGAGCTGGGTCCGCCAGGCTCCAGGGAAGGGGCTGGAGTG |
| | Sequence | GGTCTCAGCTATTAGTGGTAGTGGTGGTAGCACATACTACGCAGACTCCGTGAAGGGCCGGTTCACCATC |
| | | TCCAGAGACAATTCCAAGAACACGCTGTATCTGCAAATGAACAGCCTGAGAGCCGAGGACACGGCGGTGT |
| | | ACTACTGCGCCAAGGGCCCCAGATACTACTGGTACAGCTGGTACTTCGACCTATGGGGGAGAGGTACCTT |
| | | GGTCACCGTCTCCTCA |
| 561 | BIIB-12-1320_VH | QLQLQESGPGLVKPSETLSLTCTVSGGSISSSSYYWGWIRQPPGKGLEWIGSIYYSGSTYYNPSLKSRVT |
| | Amino Acid | ISVDTSKNQFSLKLSSVTAADTAVYYCARGSGLLVREHYYYYMDVWGKGTTVTVS |
| | Sequence | |
| 562 | BIIB-12-1320_VH | CAGCTGCAGCTGCAGGAGTCGGGCCCAGGACTGGTGAAGCCTTCGGAGACCCTGTCCCTCACCTGCACTG |
| | Nucleic Acid | TCTCTGGTGGCTCCATCAGCAGTAGTAGTTACTACTGGGGCTGGATCCGCCAGCCCCCAGGGAAGGGGCT |
| | Sequence | GGAGTGGATTGGGAGTATCTATTATAGTGGGAGCACCTACTACAACCCGTCCCTCAAGAGTCGAGTCACC |
| | | ATATCCGTAGACACGTCCAAGAACCAGTTCTCCCTGAAGCTGAGTTCTGTGACCGCCGCAGACACGGCGG |
| | | TGTACTACTGCGCCAGAGGCTCTGGATTGCTAGTCCGAGAGCACTACTACTACTACATGGACGTATGGGG |
| | | CAAGGGTACAACTGTCACCGTCTCCTCA |
| 563 | BIIB-12-1321_VH | QVQLVQSGAEVKKPGSSVKVSCKASGGTFSSYAISWVRQAPGQGLEWMGGIIPIFGTANYAQKFQGRVTI |
| | Amino Acid | TADESTSTAYMELSSLRSEDTAVYYCARTPDTSSATDWGQGTLVTVSS |
| | Sequence | |
| 564 | BIIB-12-1321_VH | CAGGTGCAGCTGGTGCAGTCTGGGGCTGAGGTGAAGAAGCCTGGGTCCTCGGTGAAGGTCTCCTGCAAGG |
| | Nucleic Acid | CTTCTGGAGGCACCTTCAGCAGCTATGCTATCAGCTGGGTGCGACAGGCCCCTGGACAAGGGCTTGAGTG |
| | Sequence | GATGGGAGGGATCATCCCTATCTTTGGTACAGCAAACTACGCACAGAAGTTCCAGGGCAGAGTCACGATT |
| | | ACCGCGGACGAATCCACGAGCACAGCCTACATGGAGCTGAGCAGCCTGAGATCTGAGGACACGGCGGTGT |
| | | ACTACTGCGCCAGAACTCCTGACACAAGCTCTGCTACCGATTGGGGACAGGGTACATTGGTCACCGTCTC |
| | | CTCA |

Class V Antibodies - VL Sequences

| | | |
|---|---|---|
| 565 | BIIB-12-891_VL | DIVMTQSPDSLAVSLGERATINCKSSQSVLYSSNNKNYLAWYQQKPGQPPKLLIYWASTRESGVPDRFSG |
| | Amino Acid | SGSGTDFTLTISSLQAEDVAVYYCQQYFNPPFTFGGGTKVEIK |
| | Sequence | |
| 566 | BIIB-12-891_VL | GACATCGTGATGACCCAGTCTCCAGACTCCCTGGCTGTGTCTCTGGGCGAGAGGGCCACCATCAACTGCA |
| | Nucleic Acid | AGTCCAGCCAGAGTGTTTTATACAGCTCCAACAATAAGAACTACTTAGCTTGGTACCAGCAGAAACCAGG |
| | Sequence | ACAGCCTCCTAAGCTGCTCATTTACTGGGCATCTACCCGGGAATCCGGGGTCCCTGACCGATTCAGTGGC |
| | | AGCGGGTCTGGGACAGATTTCACTCTCACCATCAGCAGCCTGCAGGCTGAAGATGTGGCAGTTTATTACT |
| | | GTCAGCAGTACTTCAACCCCCCTTTCACTTTTGGCGGAGGGACCAAGGTTGAGATCAAA |
| 567 | BIIB-12-892_VL | EIVLTQSPATLSLSPGERATLSCRASQSVSSYLAWYQQKPGQAPRLLIYDASNRATGIPARFSGSGSGTD |
| | Amino Acid | FTLTISSLEPEDFAVYYCQQRLNLPLTFGGGTKVEIK |
| | Sequence | |
| 568 | BIIB-12-892_VL | GAAATTGTGTTGACACAGTCTCCAGCCACCCTGTCTTTGTCTCCAGGGGAAAGAGCCACCCTCTCCTGCA |
| | Nucleic Acid | GGGCCAGTCAGAGTGTTAGCAGCTACTTAGCCTGGTACCAACAGAAACCTGGCCAGGCTCCCAGGCTCCT |
| | Sequence | CATTTATGATGCATCCAACAGGGCCACTGGCATCCCAGCCAGGTTCAGTGGCAGTGGGTCTGGGACAGAT |
| | | TTCACTCTCACCATCAGCAGCCTAGAGCCTGAAGATTTTGCAGTTTATTACTGTCAGCAGAGACTCAACC |
| | | TCCCTCTCACTTTTGGCGGAGGGACCAAGGTTGAGATCAAA |
| 569 | BIIB-12-893_VL | DIQLTQSPSSVSASVGDRVTITCRASQGISSWLAWYQQKPGKAPKLLIYAASSLQSGVPSRFSGSGSGTD |
| | Amino Acid | FTLTISSLQPEDFATYYCQQAAAFPFTFGGGTKVEIK |
| | Sequence | |
| 570 | BIIB-12-893_VL | GACATCCAGTTGACCCAGTCTCCATCTTCCGTGTCTGCATCTGTAGGAGACAGAGTCACCATCACTTGTC |
| | Nucleic Acid | GGGCGAGTCAGGGTATTAGCAGCTGGTTAGCCTGGTATCAGCAGAAACCAGGGAAAGCCCCTAAGCTCCT |
| | Sequence | GATCTATGCTGCATCCAGTTTGCAAAGTGGGGTCCCATCAAGGTTCAGCGGCAGTGGATCTGGGACAGAT |
| | | TTCACTCTCACCATCAGCAGCCTGCAGCCTGAAGATTTTGCAACTTATTACTGTCAGCAGGCAGCCGCCT |
| | | TCCCTTTCACTTTTGGCGGAGGGACCAAGGTTGAGATCAAA |
| 571 | BIIB-12-895_VL | DIQMTQSPSSVSASVGDRVTITCRASQGISSWLAWYQQKPGKAPKLLIYAASSLQSGVPSRFSGSGSGTD |
| | Amino Acid | FTLTISSLQPEDFATYYCQQASSFPFTFGGGTKVEI |
| | Sequence | |
| 572 | BIIB-12-895_VL | GACATCCAGATGACCCAGTCTCCATCTTCCGTGTCTGCATCTGTAGGAGACAGAGTCACCATCACTTGTC |
| | Nucleic Acid | GGGCGAGTCAGGGTATTAGCAGCTGGTTAGCCTGGTATCAGCAGAAACCAGGGAAAGCCCCTAAGCTCCT |
| | Sequence | GATCTATGCTGCATCCAGTTTGCAAAGTGGGGTCCCATCAAGGTTCAGCGGCAGTGGATCTGGGACAGAT |
| | | TTCACTCTCACCATCAGCAGCCTGCAGCCTGAAGATTTTGCAACTTATTACTGTCAGCAGGCATCCAGTT |
| | | TCCCTTTCACTTTTGGCGGAGGGACCAAGGTTGAGATCAAA |
| 573 | BIIB-12-896_VL | DIQMTQSPSSVSASVGDRVTITCRASQGISSWLAWYQQKPGKAPKLLIYAASSLQSGVPSRFSGSGSGTD |
| | Amino Acid | FTLTISSLQPEDFATYYCQQANSFPFTFGGGTKVEIK |
| | Sequence | |
| 574 | BIIB-12-896_VL | GACATCCAGATGACCCAGTCTCCATCTTCCGTGTCTGCATCTGTAGGAGACAGAGTCACCATCACTTGTC |
| | Nucleic Acid | GGGCGAGTCAGGGTATTAGCAGCTGGTTAGCCTGGTATCAGCAGAAACCAGGGAAAGCCCCTAAGCTCCT |
| | Sequence | GATCTATGCTGCATCCAGTTTGCAAAGTGGGGTCCCATCAAGGTTCAGCGGCAGTGGATCTGGGACAGAT |
| | | TTCACTCTCACCATCAGCAGCCTGCAGCCTGAAGATTTTGCAACTTATTACTGTCAGCAGGCAAATTCCT |
| | | TCCCTTTCACTTTTGGCGGAGGGACCAAGGTTGAGATCAAA |
| 575 | BIIB-12-897_VL | EIVLTQSPGTLSLSPGERATLSCRASQSVSSSYLAWYQQKPGQAPRLLIYGASSRATGIPDRFSGSGSGT |
| | Amino Acid | DFTLTISRLEPEDFAVYYCQQDGNYPYTFGGGTKVEIK |
| | Sequence | |
| 576 | BIIB-12-897_VL | GAAATTGTGTTGACGCAGTCTCCAGGCACCCTGTCTTTGTCTCCAGGGGAAAGAGCCACCCTCTCCTGCA |
| | Nucleic Acid | GGGCCAGTCAGAGTGTTAGCAGCAGCTACTTAGCCTGGTACCAGCAGAAACCTGGCCAGGCTCCCAGGCT |
| | Sequence | CCTCATCTATGGTGCATCCAGCAGGGCCACTGGCATCCCAGACAGGTTCAGTGGCAGTGGGTCTGGGACA |
| | | GACTTCACTCTCACCATCAGCAGACTGGAGCCTGAAGATTTTGCAGTGTATTACTGTCAGCAGGACGGAA |
| | | ACTACCCTTACACTTTTGGCGGAGGGACCAAGGTTGAGATCAAA |
| 577 | BIIB-12-898_VL | DIQLTQSPSTLSASVGDRVTITCRASQAISSWLAWYQQKPGKAPKLLIYDASSLESGVPSRFSGSGSGTE |
| | Amino Acid | FTLTISSLQPDDFATYYCQQVNRFPFTFGGGTKVEIK |
| | Sequence | |
| 578 | BIIB-12-898_VL | GACATCCAGTTGACCCAGTCTCCTTCCACCCTGTCTGCATCTGTAGGAGACAGAGTCACCATCACTTGCC |
| | Nucleic Acid | GGGCCAGTCAGGCTATTAGTAGCTGGTTGGCCTGGTATCAGCAGAAACCAGGGAAAGCCCCTAAGCTCCT |
| | Sequence | GATCTATGATGCCTCCAGTTTGGAAAGTGGGGTCCCATCAAGGTTCAGCGGCAGTGGATCTGGGACAGAA |
| | | TTCACTCTCACCATCAGCAGCCTGCAGCCTGATGATTTTGCAACTTATTACTGCCAGCAGGTCAATCGCT |
| | | TCCCTTTCACTTTTGGCGGAGGGACCAAGGTTGAGATCAAA |
| 579 | BIIB-12-899_VL | DIVMTQSPDSLAVSLGERATINCKSSQSVLYSSNNKNYLAWYQQKPGQPPKLLIYWASTRESGVPDRFSG |
| | Amino Acid | SGSGTDFTLTISSLQAEDVAVYYCQQSYTLPPTFGGGTKVEIK |
| | Sequence | |
| 580 | BIIB-12-899_VL | GACATCGTGATGACCCAGTCTCCAGACTCCCTGGCTGTGTCTCTGGGCGAGAGGGCCACCATCAACTGCA |
| | Nucleic Acid | AGTCCAGCCAGAGTGTTTTATACAGCTCCAACAATAAGAACTACTTAGCTTGGTACCAGCAGAAACCAGG |
| | Sequence | ACAGCCTCCTAAGCTGCTCATTTACTGGGCATCTACCCGGGAATCCGGGGTCCCTGACCGATTCAGTGGC |
| | | AGCGGGTCTGGGACAGATTTCACTCTCACCATCAGCAGCCTGCAGGCTGAAGATGTGGCAGTTTATTACT |
| | | GTCAGCAGTCCTACACCCTCCCTCCTACTTTTGGCGGAGGGACCAAGGTTGAGATCAAA |
| 581 | BIIB-12-900_VL | DIQMTQSPSTLSASVGDRVTITCRASQSISSWLAWYQQKPGKAPKLLIYKASSLESGVPSRFSGSGSGTE |
| | Amino Acid | FTLTISSLQPDDFATYYCQQYRSYPTFGGGTKVEIK |
| | Sequence | |
| 582 | BIIB-12-900_VL | GACATCCAGATGACCCAGTCTCCTTCCACCCTGTCTGCATCTGTAGGAGACAGAGTCACCATCACTTGCC |
| | Nucleic Acid | GGGCCAGTCAGAGTATTAGTAGCTGGTTGGCCTGGTATCAGCAGAAACCAGGGAAAGCCCCTAAGCTCCT |
| | Sequence | GATCTATAAAGCCTCCAGTTTGGAAAGTGGGGTCCCATCAAGGTTCAGCGGCAGTGGATCTGGGACAGAA |
| | | TTCACTCTCACCATCAGCAGCCTGCAGCCTGATGATTTTGCAACTTATTACTGCCAGCAGTACCGAAGCT |
| | | ACCCTACTTTTGGCGGAGGGACCAAGGTTGAGATCAAA |
| 583 | BIIB-12-901_VL | EIVLTQSPATLSLSPGERATLSCRASQSVSSYLAWYQQKPGQAPRLLIYDASNRATGIPARFSGSGSGTD |
| | Amino Acid | FTLTISSLEPEDFAVYYCQQSANFPFTFGGGTKVEIK |
| | Sequence | |
| 584 | BIIB-12-901_VL | GAAATTGTGTTGACACAGTCTCCAGCCACCCTGTCTTTGTCTCCAGGGGAAAGAGCCACCCTCTCCTGCA |
| | Nucleic Acid | GGGCCAGTCAGAGTGTTAGCAGCTACTTAGCCTGGTACCAACAGAAACCTGGCCAGGCTCCCAGGCTCCT |
| | Sequence | CATCTATGATGCATCCAACAGGGCCACTGGCATCCCAGCCAGGTTCAGTGGCAGTGGGTCTGGGACAGAC |
| | | TTCACTCTCACCATCAGCAGCCTAGAGCCTGAAGATTTTGCAGTTTATTACTGTCAGCAGTCCGCCAATT |
| | | TCCCTTTCACTTTTGGCGGAGGGACCAAGGTTGAGATCAAA |
| 585 | BIIB-12-902_VL | DIVMTQSPDSLAVSLGERATINCKSSQSVLYSSNNKNYLAWYQQKPGQPPKLLISWASTRESGVPDRFSG |
| | Amino Acid | SGSGTDFTLTISSLQAEDVAVYYCQQSFSTPFTFGGGTKVEIK |
| | Sequence | |
| 586 | BIIB-12-902_VL | GACATCGTGATGACCCAGTCTCCAGACTCCCTGGCTGTGTCTCTGGGCGAGAGGGCCACCATCAACTGCA |
| | Nucleic Acid | AGTCCAGCCAGAGTGTTTTATACAGCTCCAACAATAAGAACTACTTAGCTTGGTACCAGCAGAAACCAGG |
| | Sequence | ACAGCCTCCTAAGCTGCTCATTTCCTGGGCATCTACCCGGGAATCCGGGGTCCCTGACCGATTCAGTGGC |
| | | AGCGGGTCTGGGACAGATTTCACTCTCACCATCAGCAGCCTGCAGGCTGAAGATGTGGCAGTTTATTACT |
| | | GTCAGCAGTCCTTCTCCACTCCTTTCACTTTTGGCGGAGGGACCAAGGTTGAGATCAAA |
| 587 | BIIB-12-903_VL | EIVLTQSPATLSLSPGERATLSCRASQSVSSYLAWYQQKPGQAPRLLIYDASNRATGIPARFSGSGSGTD |
| | Amino Acid | FTLTISSLEPEDFAVYYCQQRANWPPTFGGGTKVEIK |
| | Sequence | |
| 588 | BIIB-12-903_VL | GAAATTGTGTTGACACAGTCTCCAGCCACCCTGTCTTTGTCTCCAGGGGAAAGAGCCACCCTCTCCTGCA |
| | Nucleic Acid | GGGCCAGTCAGAGTGTTAGCAGCTACTTAGCCTGGTACCAACAGAAACCTGGCCAGGCTCCCAGGCTCCT |
| | Sequence | CATCTATGATGCATCCAACAGGGCCACTGGCATCCCAGCCAGGTTCAGTGGCAGTGGGTCTGGGACAGAC |
| | | TTCACTCTCACCATCAGCAGCCTAGAGCCTGAAGATTTTGCAGTTTATTACTGTCAGCAGAGAGCCAACT |
| | | GGCCTCCTACTTTTGGCGGAGGGACCAAGGTTGAGATCAAA |
| 589 | BIIB-12-904_VL | EIVMTQSPATLSVSPGERATLSCRASQSVSSNLAWYQQKPGQAPRLLIYGASTRATGIPARFSGSGSGTE |
| | Amino Acid | FTLTISSLQSEDFAVYYCQQAFNWPPTFGGGTKVEIK |
| | Sequence | |
| 590 | BIIB-12-904_VL | GAAATAGTGATGACGCAGTCTCCAGCCACCCTGTCTGTGTCTCCAGGGGAAAGAGCCACCCTCTCCTGCA |
| | Nucleic Acid | GGGCCAGTCAGAGTGTTAGCAGCAACTTAGCCTGGTACCAGCAGAAACCTGGCCAGGCTCCCAGGCTCCT |
| | Sequence | CATCTATGGTGCATCCACCAGGGCCACTGGTATCCCAGCCAGGTTCAGTGGCAGTGGGTCTGGGACAGAG |
| | | TTCACTCTCACCATCAGCAGCCTGCAGTCTGAAGATTTTGCAGTTTATTACTGTCAGCAGGCCTTCAACT |
| | | GGCCTCCTACTTTTGGCGGAGGGACCAAGGTTGAGATCAAA |
| 591 | BIIB-12-905_VL | EIVLTQSPGTLSLSPGERATLSCRASQSVRSSYLAWYQQKPGQAPRLLIYGASSRATGIPDRFSGSGSGT |
| | Amino Acid | DFTLTISRLEPEDFAVYYCQQYGRFPPTFGGGTKVEIK |
| | Sequence | |
| 592 | BIIB-12-905_VL | GAAATTGTGTTGACGCAGTCTCCAGGCACCCTGTCTTTGTCTCCAGGGGAAAGAGCCACCCTCTCCTGCA |
| | Nucleic Acid | GGGCCAGTCAGAGTGTTAGGAGCAGCTACTTAGCCTGGTACCAGCAGAAACCTGGCCAGGCTCCCAGGCT |
| | Sequence | CCTCATCTATGGTGCATCCAGCAGGGCCACTGGCATCCCAGACAGGTTCAGTGGCAGTGGGTCTGGGACA |
| | | GACTTCACTCTCACCATCAGCAGACTGGAGCCTGAAGATTTTGCAGTGTATTACTGTCAGCAGTACGGAC |
| | | GCTTCCCTCCTACTTTTGGCGGAGGGACCAAGGTTGAGATCAAA |
| 593 | BIIB-12-906_VL | EIVLTQSPATLSLSPGERATLSCRASQSVSSYLAWYQQKPGQAPRLLIYDASNRATGIPARFSGSGSGTD |
| | Amino Acid | FTLTISSLEPEDFAVYYCQQSSDWPPTFGGGTKVEIK |
| | Sequence | |
| 594 | BIIB-12-906_VL | GAAATTGTGTTGACACAGTCTCCAGCCACCCTGTCTTTGTCTCCAGGGGAAAGAGCCACCCTCTCCTGCA |
| | Nucleic Acid | GGGCCAGTCAGAGTGTTAGCAGCTACTTAGCCTGGTACCAACAGAAACCTGGCCAGGCTCCCAGGCTCCT |
| | Sequence | CATCTATGATGCATCCAACAGGGCCACTGGCATCCCAGCCAGGTTCAGTGGCAGTGGGTCTGGGACAGAC |
| | | TTCACTCTCACCATCAGCAGCCTAGAGCCTGAAGATTTTGCAGTTTATTACTGTCAGCAGTCCTCCGACT |
| | | GGCCTCCTACTTTTGGCGGAGGGACCAAGGTTGAGATCAAA |
| 595 | BIIB-12-907_VL | DIVMTQSPLSLPVTPGEPASISCRSSQSLLYSNGYNYLDWYLQKPGQSPQLLIYLGSNRASGVPDRFSGS |
| | Amino Acid | GSGTDFTLKISRVEAEDVGVYYCMQRLGLPPTFGGGTKVEIK |
| | Sequence | |
| 596 | BIIB-12-907_VL | GATATTGTGATGACTCAGTCTCCACTCTCCCTGCCCGTCACCCCTGGAGAGCCGGCCTCCATCTCCTGCA |
| | Nucleic Acid | GGTCTAGTCAGAGCCTCCTGTATAGTAATGGATACAACTATTTGGATTGGTACCTGCAGAAGCCAGGGCA |
| | Sequence | GTCTCCACAGCTCCTGATCTATTTGGGTTCTAATCGGGCCTCCGGGGTCCCTGACAGGTTCAGTGGCAGT |
| | | GGATCAGGCACAGATTTTACACTGAAAATCAGCAGAGTGGAGGCTGAGGATGTTGGGGTTTATTACTGCA |
| | | TGCAGAGACTCGGCCTCCCTCCTACTTTTGGCGGAGGGACCAAGGTTGAGATCAAA |
| 597 | BIIB-12-908_VL | DIQLTQSPSSVSASVGDRVTITCRASQGISSWLAWYQQKPGKAPKLLIYGASSLQSGVPSRFSGSGSGTD |
| | Amino Acid | FTLTISSLQPEDFATYYCQQGSSLPITFGGGTKVEIK |
| | Sequence | |
| 598 | BIIB-12-908_VL | GACATCCAGTTGACCCAGTCTCCATCTTCCGTGTCTGCATCTGTAGGAGACAGAGTCACCATCACTTGTC |
| | Nucleic Acid | GGGCGAGTCAGGGTATTAGCAGCTGGTTAGCCTGGTATCAGCAGAAACCAGGGAAAGCCCCTAAGCTCCT |
| | Sequence | GATCTATGGTGCATCCAGTTTGCAAAGTGGGGTCCCATCAAGGTTCAGCGGCAGTGGATCTGGGACAGAT |
| | | TTCACTCTCACCATCAGCAGCCTGCAGCCTGAAGATTTTGCAACTTATTACTGTCAGCAGGGATCCAGTC |
| | | TCCCTATCACTTTTGGCGGAGGGACCAAGGTTGAGATCAAA |
| 599 | BIIB-12-909_VL | EIVLTQSPATLSLSPGERATLSCRASQSVSSYLAWYQQKPGQAPRLLIYDASNRATGIPARFSGSGSGTD |
| | Amino Acid | FTLTISSLEPEDFAVYYCQQLSDWPPTFGGGTKVEIK |
| | Sequence | |
| 600 | BIIB-12-909_VL | GAAATTGTGTTGACACAGTCTCCAGCCACCCTGTCTTTGTCTCCAGGGGAAAGAGCCACCCTCTCCTGCA |
| | Nucleic Acid | GGGCCAGTCAGAGTGTTAGCAGCTACTTAGCCTGGTACCAACAGAAACCTGGCCAGGCTCCCAGGCTCCT |
| | Sequence | CATCTATGATGCATCCAACAGGGCCACTGGCATCCCAGCCAGGTTCAGTGGCAGTGGGTCTGGGACAGAC |
| | | TTCACTCTCACCATCAGCAGCCTAGAGCCTGAAGATTTTGCAGTTTATTACTGTCAGCAGCTCAGTGACT |
| | | GGCCTCCTACTTTTGGCGGAGGGACCAAGGTTGAGATCAAA |
| 601 | BIIB-12-910_VL | DIQMTQSPSSLSASVGDRVTITCRASQSISSYLNWYQQKPGKAPKLLIYAASSLQSGVPSRFSGSGSGTD |
| | Amino Acid | FTLTISSLQPEDFATYYCQQLSHTPFTFGGGTKVEIK |
| | Sequence | |
| 602 | BIIB-12-910_VL | GACATCCAGATGACCCAGTCTCCATCCTCCCTGTCTGCATCTGTAGGAGACAGAGTCACCATCACTTGCC |
| | Nucleic Acid | GGGCAAGTCAGAGCATTAGCAGCTATTTAAATTGGTATCAGCAGAAACCAGGGAAAGCCCCTAAGCTCCT |
| | Sequence | GATCTATGCTGCATCCAGTTTGCAAAGTGGGGTCCCATCAAGGTTCAGTGGCAGTGGATCTGGGACAGAT |
| | | TTCACTCTCACCATCAGCAGTCTGCAACCTGAAGATTTTGCAACTTACTACTGTCAGCAACTATCCCACA |
| | | CTCCTTTCACTTTTGGCGGAGGGACCAAGGTTGAGATCAAA |
| 603 | BIIB-12-911_VL | EIVLTQSPATLSLSPGERATLSCRASQSVSSYLAWYQQKPGQAPRLLIYDASNRATGIPARFSGSGSGTD |
| | Amino Acid | FTLTISSLEPEDFAVYYCQQRSNFPITFGGGTKVEIK |
| | Sequence | |
| 604 | BIIB-12-911_VL | GAAATTGTGTTGACACAGTCTCCAGCCACCCTGTCTTTGTCTCCAGGGGAAAGAGCCACCCTCTCCTGCA |
| | Nucleic Acid | GGGCCAGTCAGAGTGTTAGCAGCTACTTAGCCTGGTACCAACAGAAACCTGGCCAGGCTCCCAGGCTCCT |
| | Sequence | CATCTATGATGCATCCAACAGGGCCACTGGCATCCCAGCCAGGTTCAGTGGCAGTGGGTCTGGGACAGAC |
| | | TTCACTCTCACCATCAGCAGCCTAGAGCCTGAAGATTTTGCAGTTTATTACTGTCAGCAGAGAAGTAACT |
| | | TCCCTATCACTTTTGGCGGAGGGACCAAGGTTGAGATCAAA |
| 605 | BIIB-12-912_VL | EIVMTQSPATLSVSPGERATLSCRASQSVSSNLAWYQQKPGQAPRLLIYGASTRATGIPARFSGSGSGTE |
| | Amino Acid | FTLTISSLQSEDFAVYYCQQFHNFPPTFGGGTKVEIK |
| | Sequence | |
| 606 | BIIB-12-912_VL | GAAATAGTGATGACGCAGTCTCCAGCCACCCTGTCTGTGTCTCCAGGGGAAAGAGCCACCCTCTCCTGCA |
| | Nucleic Acid | GGGCCAGTCAGAGTGTTAGCAGCAACTTAGCCTGGTACCAGCAGAAACCTGGCCAGGCTCCCAGGCTCCT |
| | Sequence | CATCTATGGTGCATCCACCAGGGCCACTGGTATCCCAGCCAGGTTCAGTGGCAGTGGGTCTGGGACAGAG |
| | | TTCACTCTCACCATCAGCAGCCTGCAGTCTGAAGATTTTGCAGTTTATTACTGTCAGCAGTTCCACAATT |
| | | TCCCTCCTACTTTTGGCGGAGGGACCAAGGTTGAGATCAA |
| 607 | BIIB-12-913_VL | EIVMTQSPATLSVSPGERATLSCRASQSVSSNLAWYQQKPGQAPRLLIYGASTRATGIPARFSGSGSGTE |
| | Amino Acid | FTLTISSLQSEDFAVYYCQQYAPYPPLTFGGGTKVEIK |
| | Sequence | |
| 608 | BIIB-12-913_VL | GAAATAGTGATGACGCAGTCTCCAGCCACCCTGTCTGTGTCTCCAGGGGAAAGAGCCACCCTCTCCTGCA |
| | Nucleic Acid | GGGCCAGTCAGAGTGTTAGCAGCAACTTAGCCTGGTACCAGCAGAAACCTGGCCAGGCTCCCAGGCTCCT |
| | Sequence | CATCTATGGTGCATCCACCAGGGCCACTGGTATCCCAGCCAGGTTCAGTGGCAGTGGGTCTGGGACAGAG |
| | | TTCACTCTCACCATCAGCAGCCTGCAGTCTGAAGATTTTGCAGTTTATTACTGTCAGCAGTACGCCCCCT |
| | | ACCCTCCTCTCACTTTTGGCGGAGGGACCAAGGTTGAGATCAAA |
| 609 | BIB-12-914_VL | DIQMTQSPSSLSASVGDRVTITCRASQSISSYLNWYQQKPGKAPKLLIYAASSLQSGVPSRFSGSGSGTD |
| | Amino Acid | FTLTISSLQPEDFATYYCQQGYNTPLTFGGGTKVEIK |
| | Sequence | |
| 610 | BIIB-12-914_VL | GACATCCAGATGACCCAGTCTCCATCCTCCCTGTCTGCATCTGTAGGAGACAGAGTCACCATCACTTGCC |
| | Nucleic Acid | GGGCAAGTCAGAGCATTAGCAGCTATTTAAATTGGTATCAGCAGAAACCAGGGAAAGCCCCTAAGCTCCT |
| | Sequence | GATCTATGCTGCATCCAGTTTGCAAAGTGGGGTCCCATCAAGGTTCAGTGGCAGTGGATCTGGGACAGAT |
| | | TTCACTCTCACCATCAGCAGTCTGCAACCTGAAGATTTTGCAACTTACTACTGTCAGCAAGGATACAACA |
| | | CTCCTCTCACTTTTGGCGGAGGGACCAAGGTTGAGATCAAA |
| 611 | BIIB-12-915_VL | DIVMTQSPLSLPVTPGEPASISCRSSQSLLHSNGYNYLDWYLQKPGQSPQLLIYLASNRASGVPDRFSGS |
| | Amino Acid | GSGTDFTLKISRVEAEDVGVYYCMQARQRPWTFGGGTKVEIK |
| | Sequence | |
| 612 | BIIB-12-915_VL | GATATTGTGATGACTCAGTCTCCACTCTCCCTGCCCGTCACCCCTGGAGAGCCGGCCTCCATCTCCTGCA |
| | Nucleic Acid | GGTCTAGTCAGAGCCTCCTGCATAGTAATGGATACAACTATTTGGATTGGTACCTGCAGAAGCCAGGGCA |
| | Sequence | GTCTCCACAGCTCCTGATCTATTTGGCTTCTAATCGGGCCTCCGGGGTCCCTGACAGGTTCAGTGGCAGT |
| | | GGATCAGGCACAGATTTTACACTGAAAATCAGCAGAGTGGAGGCTGAGGATGTTGGGGTTTATTACTGCA |
| | | TGCAGGCAAGACAGCGCCCTTGGACTTTTGGCGGAGGGACCAAGGTTGAGATCAAA |
| 613 | BIIB-12-916_VL | DIQMTQSPSSLSASVGDRVTITCRASQSISSYLNWYQQKPGKAPKLLIYAASSLQSGVPSRFSGSGSGTD |
| | Amino Acid | FTLTISSLQPEDFATYYCQQLAITPFTFGGGTKVEIK |
| | Sequence | |
| 614 | BIIB-12-916_VL | GACATCCAGATGACCCAGTCTCCATCCTCCCTGTCTGCATCTGTAGGAGACAGAGTCACCATCACTTGCC |
| | Nucleic Acid | GGGCAAGTCAGAGCATTAGCAGCTATTTAAATTGGTATCAGCAGAAACCAGGGAAAGCCCCTAAGCTCCT |
| | Sequence | GATCTATGCTGCATCCAGTTTGCAAAGTGGGGTCCCATCAAGGTTCAGTGGCAGTGGATCTGGGACAGAT |
| | | TTCACTCTCACCATCAGCAGTCTGCAACCTGAAGATTTTGCAACTTACTACTGTCAGCAACTAGCCATCA |
| | | CTCCTTTCACTTTTGGCGGAGGGACCAAGGTTGAGATCAAA |
| 615 | BIIB-12-917_VL | EIVMTQSPATLSVSPGERATLSCRASQSVSSNLAWYQQKPGQAPRLLIYGASTRATGIPARFSGSGSGTE |
| | Amino Acid | FTLTISSLQSEDFAVYYCQQLFNHPPTFGGGTKVEIK |
| | Sequence | |
| 616 | BIIB-12-917_VL | GAAATAGTGATGACGCAGTCTCCAGCCACCCTGTCTGTGTCTCCAGGGGAAAGAGCCACCCTCTCCTGCA |
| | Nucleic Acid | GGGCCAGTCAGAGTGTTAGCAGCAACTTAGCCTGGTACCAGCAGAAACCTGGCCAGGCTCCCAGGCTCCT |
| | Sequence | CATCTATGGTGCATCCACCAGGGCCACTGGTATCCCAGCCAGGTTCAGTGGCAGTGGGTCTGGGACAGAG |
| | | TTCACTCTCACCATCAGCAGCCTGCAGTCTGAAGATTTTGCAGTTTATTACTGTCAGCAGCTCTTCAATC |
| | | ACCCTCCTACTTTTGGCGGAGGGACCAAGGTTGAGATCAAA |
| 617 | BIIB-12-918_VL | DIQMTQSPSSLSASVGDRVTITCRASQSISRYLNWYQQKPGKAPKLLIYAASSLQSGVPSRFSGSGSGTD |
| | Amino Acid | FTLTISSLQPEDFATYYCQQIFSLPITFGGGTKVEIK |
| | Sequence | |
| 618 | BIIB-12-918_VL | GACATCCAGATGACCCAGTCTCCATCCTCCCTGTCTGCATCTGTAGGAGACAGAGTCACCATCACTTGCC |
| | Nucleic Acid | GGGCAAGTCAGAGCATTAGCAGATATTTAAATTGGTATCAGCAGAAACCAGGGAAAGCCCCTAAGCTCCT |
| | Sequence | GATCTATGCTGCATCCAGTTTGCAAAGTGGGGTCCCATCAAGGTTCAGTGGCAGTGGATCTGGGACAGAT |
| | | TTCACTCTCACCATCAGCAGTCTGCAACCTGAAGATTTTGCAACTTACTACTGTCAGCAAATATTCAGTC |
| | | TCCCTATCACTTTTGGCGGAGGGACCAAGGTTGAGATCAAA |
| 619 | BIIB-12-919_VL | DIQMTQSPSTLSASVGDRVTITCRASQSISSWLAWYQQKPGKAPKLLIYKASSLESGVPSRFSGSGSGTE |
| | Amino Acid | FTLTISSLQPDDFATYYCQQVSSYPTFGGGTKVEIK |
| | Sequence | |
| 620 | BIIB-12-919_VL | GACATCCAGATGACCCAGTCTCCTTCCACCCTGTCTGCATCTGTAGGAGACAGAGTCACCATCACTTGCC |
| | Nucleic Acid | GGGCCAGTCAGAGTATTAGTAGCTGGTTGGCCTGGTATCAGCAGAAACCAGGGAAAGCCCCTAAGCTCCT |
| | Sequence | GATCTATAAAGCCTCCAGTTTGGAAAGTGGGGTCCCATCAAGGTTCAGCGGCAGTGGATCTGGGACAGAA |
| | | TTCACTCTCACCATCAGCAGCCTGCAGCCTGATGATTTTGCAACTTATTACTGCCAGCAGGTCAGCAGTT |
| | | ACCCTACTTTTGGCGGAGGGACCAAGGTTGAGATCAAA |
| 621 | BIIB-12-920_VL | EIVMTQSPATLSVSPGERATLSCRASQSVSSNLAWYQQKPGQAPRLLIYSASTRATGIPARFSGSGSGTE |
| | Amino Acid | FTLTISSLQSEDFAVYYCQQANAYPPTFGGGTKVEI |
| | Sequence | |
| 622 | BIIB-12-920_VL | GAAATAGTGATGACGCAGTCTCCAGCCACCCTGTCTGTGTCTCCAGGGGAAAGAGCCACCCTCTCCTGCA |
| | Nucleic Acid | GGGCCAGTCAGAGTGTTAGCAGCAACTTAGCCTGGTACCAGCAGAAACCTGGCCAGGCTCCCAGGCTCCT |
| | Sequence | CATCTATAGCGCATCCACCAGGGCCACTGGTATCCCAGCCAGGTTCAGTGGCAGTGGGTCTGGGACAGAG |
| | | TTCACTCTCACCATCAGCAGCCTGCAGTCTGAAGATTTTGCAGTTTATTACTGTCAGCAGGCCAATGCCT |
| | | ACCCTCCTACTTTTGGCGGAGGGACCAAGGTTGAGATCAAA |
| 623 | BIIB-12-921_VL | DIQMTQSPSSVSASVGDRVTITCRASQGISRWLAWYQQKPGKAPKLLIYAASSLQSGVPSRFSGSGSGTD |
| | Amino Acid | FTLTISSLQPEDFATYYCQQGNVFPLTFGGGTKVEIK |
| | Sequence | |
| 624 | BIIB-12-921_VL | GACATCCAGATGACCCAGTCTCCATCTTCCGTGTCTGCATCTGTAGGAGACAGAGTCACCATCACTTGTC |
| | Nucleic Acid | GGGCGAGTCAGGGTATTAGCAGGTGGTTAGCCTGGTATCAGCAGAAACCAGGGAAAGCCCCTAAGCTCCT |
| | Sequence | GATCTATGCTGCATCCAGTTTGCAAAGTGGGGTCCCATCAAGGTTCAGCGGCAGTGGATCTGGGACAGAT |
| | | TTCACTCTCACCATCAGCAGCCTGCAGCCTGAAGATTTTGCAACTTACTACTGTCAGCAGGGAAATGTCT |
| | | TCCCTCTCACTTTTGGCGGAGGGACCAAGGTTGAGATCAAA |
| 625 | BIIB-12-922_VL | DIVMTQSPLSLPVTPGEPASISCRSSQSLLHSNGYNYLDWYLQKPGQSPQLLIYLGSNRASGVPDRFSGS |
| | Amino Acid | GSGTDFTLKISRVEAEDVGVYYCMQALQTPITFGGGTKVEIK |
| | Sequence | |
| 626 | BIIB-12-922_VL | GATATTGTGATGACTCAGTCTCCACTCTCCCTGCCCGTCACCCCTGGAGAGCCGGCCTCCATCTCCTGCA |
| | Nucleic Acid | GGTCTAGTCAGAGCCTCCTGCATAGTAATGGATACAACTATTTGGATTGGTACCTGCAGAAGCCAGGGCA |
| | Sequence | GTCTCCACAGCTCCTGATCTATTTGGGTTCTAATCGGGCCTCCGGGGTCCCTGACAGGTTCAGTGGCAGT |
| | | GGATCAGGCACAGATTTTACACTGAAAATCAGCAGAGTGGAGGCTGAGGATGTTGGGGTTTATTACTGCA |
| | | TGCAGGCACTACAGACTCCTATCACTTTTGGCGGAGGGACCAAGGTTGAGATCAAA |
| 627 | BIIB-12-923_VL | DIQMTQSPSTLSASVGDRVTITCRASQSISSWLAWYQQKPGKAPKLLIYKASSLESGVPSRFSGSGSGTE |
| | Amino Acid | FTLTISSLQPDDFATYYCQQFKSLSFTFGGGTKVEIK |
| | Sequence | |
| 628 | BIIB-12-923_VL | GACATCCAGATGACCCAGTCTCCTTCCACCCTGTCTGCATCTGTAGGAGACAGAGTCACCATCACTTGCC |
| | Nucleic Acid | GGGCCAGTCAGAGTATTAGTAGCTGGTTGGCCTGGTATCAGCAGAAACCAGGGAAAGCCCCTAAGCTCCT |
| | Sequence | GATCTATAAAGCCTCCAGTTTGGAAAGTGGGGTCCCATCAAGGTTCAGCGGCAGTGGATCTGGGACAGAA |
| | | TTCACTCTCACCATCAGCAGCCTGCAGCCTGATGATTTTGCAACTTATTACTGCCAGCAGTTCAAAAGTC |
| | | TCTCTTTCACTTTTGGCGGAGGGACCAAGGTTGAGATCAAA |
| 629 | BIIB-12-924_VL | DIQMTQSPSSVSASVGDRVTITCRASQGISSWLAWYQQKPGKAPKLLIYAASSLQSGVPSRFSGSGSGTD |
| | Amino Acid | FTLTISSLQPEDFATYYCQQGNSFPLTFGGGTKVEIK |
| | Sequence | |
| 630 | BIIB-12-924_VL | GACATCCAGATGACCCAGTCTCCATCTTCCGTGTCTGCATCTGTAGGAGACAGAGTCACCATCACTTGTC |
| | Nucleic Acid | GGGCGAGTCAGGGTATTAGCAGCTGGTTAGCCTGGTATCAGCAGAAACCAGGGAAAGCCCCTAAGCTCCT |
| | Sequence | GATCTATGCTGCATCCAGTTTGCAAAGTGGGGTCCCATCAAGGTTCAGCGGCAGTGGATCTGGGACAGAT |
| | | TTCACTCTCACCATCAGCAGCCTGCAGCCTGAAGATTTTGCAACTTATTACTGTCAGCAGGGAAATTCCT |
| | | TCCCTCTCACTTTTGGCGGAGGGACCAAGGTTGAGATCAAA |
| 631 | BIIB-12-926_VL | EIVMTQSPATLSVSPGERATLSCRASQSVSSNLAWYQQKPGQAPRLLIYGASTRATGIPARFSGSGSGTE |
| | Amino Acid | FTLTISSLQSEDFAVYYCQQHSFWPPTFGGGTKVEIK |
| | Sequence | |
| 632 | BIIB-12-926_VL | GAAATAGTGATGACGCAGTCTCCAGCCACCCTGTCTGTGTCTCCAGGGGAAAGAGCCACCCTCTCCTGCA |
| | Nucleic Acid | GGGCCAGTCAGAGTGTTAGCAGCAACTTAGCCTGGTACCAGCAGAAACCTGGCCAGGCTCCCAGGCTCCT |
| | Sequence | CATCTATGGTGCATCCACCAGGGCCACTGGTATCCCAGCCAGGTTCAGTGGCAGTGGGTCTGGGACAGAG |
| | | TTCACTCTCACCATCAGCAGCCTGCAGTCTGAAGATTTTGCAGTTTATTACTGTCAGCAGCACTCCTTCT |
| | | GGCCTCCTACTTTTGGCGGAGGGACCAAGGTTGAGATCAAA |
| 633 | BIIB-12-927_VL | EIVMTQSPATLSVSPGERATLSCRASQSVSSNLAWYQQKPGQAPRLLIYGASTRATGIPARFSGSGSGTE |
| | Amino Acid | FTLTISSLQSEDFAVYYCQQFNLWPFTFGGGTKVEIK |
| | Sequence | |
| 634 | BIIB-12-927_VL | GAAATAGTGATGACGCAGTCTCCAGCCACCCTGTCTGTGTCTCCAGGGGAAAGAGCCACCCTCTCCTGCA |
| | Nucleic Acid | GGGCCAGTCAGAGTGTTAGCAGCAACTTAGCCTGGTACCAGCAGAAACCTGGCCAGGCTCCCAGGCTCCT |
| | Sequence | CATCTATGGTGCATCCACCAGGGCCACTGGTATCCCAGCCAGGTTCAGTGGCAGTGGGTCTGGGACAGAG |
| | | TTCACTCTCACCATCAGCAGCCTGCAGTCTGAAGATTTTGCAGTTTATTACTGTCAGCAGTTCAATCTCT |
| | | GGCCTTTCACTTTTGGCGGAGGGACCAAGGTTGAGATCAAA |
| 635 | BIIB-12-928_VL | EIVLTQSPGTLSLSPGERATLSCRASQSVRSSYLAWYQQKPGQAPRLLIYGASSRATGIPDRFSGSGSGT |
| | Amino Acid | DFTLTISRLEPEDFAVYYCQQYVRFPLTFGGGTKVEIK |
| | Sequence | |
| 636 | BIIB-12-928_VL | GAAATTGTGTTGACGCAGTCTCCAGGCACCCTGTCTTTGTCTCCAGGGGAAAGAGCCACCCTCTCCTGCA |
| | Nucleic Acid | GGGCCAGTCAGAGTGTTAGGAGCAGCTACTTAGCCTGGTACCAGCAGAAACCTGGCCAGGCTCCCAGGCT |
| | Sequence | CCTCATCTATGGTGCATCCAGCAGGGCCACTGGCATCCCAGACAGGTTCAGTGGCAGTGGGTCTGGGACA |
| | | GACTTCACTCTCACCATCAGCAGACTGGAGCCTGAAGATTTTGCAGTGTATTACTGTCAGCAGTACGTAC |
| | | GTTTCCCTCTCACTTTTGGCGGAGGGACCAAGGTTGAGATCAAA |
| 637 | BIIB-12-929_VL | DIVMTQSPDSLAVSLGERATINCKSSQSVLYSSNNKNYLAWYQQKPGQPPKLLISWASTRESGVPDRFSG |
| | Amino Acid | SGSGTDFTLTISSLQAEDVAVYYCQQYFSLPFTFGGGTKVEIK |
| | Sequence | |
| 638 | BIIB-12-929_VL | GACATCGTGATGACCCAGTCTCCAGACTCCCTGGCTGTGTCTCTGGGCGAGAGGGCCACCATCAACTGCA |
| | Nucleic Acid | AGTCCAGCCAGAGTGTTTTATACAGCTCCAACAATAAGAACTACTTAGCTTGGTACCAGCAGAAACCAGG |
| | Sequence | ACAGCCTCCTAAGCTGCTCATTTCCTGGGCATCTACCCGGGAATCCGGGGTCCCTGACCGATTCAGTGGC |
| | | AGCGGGTCTGGGACAGATTTCACTCTCACCATCAGCAGCCTGCAGGCTGAAGATGTGGCAGTTTATTACT |
| | | GTCAGCAGTACTTCAGTCTCCCTTTCACTTTTGGCGGAGGGACCAAGGTTGAGATCAAA |
| 639 | BIIB-12-930_VL | DIVMTQSPDSLAVSLGERATINCKSSQSVLFSSNNKNYLAWYQQKPGQPPKLLIYWASTRESGVPDRFSG |
| | Amino Acid | SGSGTDFTLTISSLQAEDVAVYYCQQYFLSPFTFGGGTKVEIK |
| | Sequence | |
| 640 | BIIB-12-930_VL | GACATCGTGATGACCCAGTCTCCAGACTCCCTGGCTGTGTCTCTGGGCGAGAGGGCCACCATCAACTGCA |
| | Nucleic Acid | AGTCCAGCCAGAGTGTTTTATTCAGCTCCAACAATAAGAACTACTTAGCTTGGTACCAGCAGAAACCAGG |
| | Sequence | ACAGCCTCCTAAGCTGCTCATTTACTGGGCATCTACCCGGGAATCCGGGGTCCCTGACCGATTCAGTGGC |
| | | AGCGGGTCTGGGACAGATTTCACTCTCACCATCAGCAGCCTGCAGGCTGAAGATGTGGCAGTTTATTACT |
| | | GTCAGCAGTACTTCCTCTCCCCTTTCACTTTTGGCGGAGGGACCAAGGTTGAGATCAAA |
| 641 | BIIB-12-931_VL | EIVMTQSPATLSVSPGERATLSCRASQSVSSNLAWYQQKPGQAPRLLIYGASTRATGIPARFSGSGSGTE |
| | Amino Acid | FTLTISSLQSEDFAVYYCQQAAYWPWTFGGGTKVEIK |
| | Sequence | |
| 642 | BIIB-12-931_VL | GAAATAGTGATGACGCAGTCTCCAGCCACCCTGTCTGTGTCTCCAGGGGAAAGAGCCACCCTCTCCTGCA |
| | Nucleic Acid | GGGCCAGTCAGAGTGTTAGCAGCAACTTAGCCTGGTACCAGCAGAAACCTGGCCAGGCTCCCAGGCTCCT |
| | Sequence | CATCTATGGTGCATCCACCAGGGCCACTGGTATCCCAGCCAGGTTCAGTGGCAGTGGGTCTGGGACAGAG |
| | | TTCACTCTCACCATCAGCAGCCTGCAGTCTGAAGATTTTGCAGTTTATTACTGTCAGCAGGCCGCCTACT |
| | | GGCCTTGGACTTTTGGCGGAGGGACCAAGGTTGAGATCAAA |
| 643 | BIIB-12-932_VL | DIQMTQSPSSLSASVGDRVTITCRASQSISSYLNWYQQKPGKAPKLLIYAASSLQSGVPSRFSGSGSGTD |
| | Amino Acid | FTLTISSLQPEDFATYYCQQSHSAPTFGGGTKVEIK |
| | Sequence | |
| 644 | BIIB-12-932_VL | GACATCCAGATGACCCAGTCTCCATCCTCCCTGTCTGCATCTGTAGGAGACAGAGTCACCATCACTTGCC |
| | Amino Acid | GGGCAAGTCAGAGCATTAGCAGCTATTTAAATTGGTATCAGCAGAAACCAGGGAAAGCCCCTAAGCTCCT |
| | Sequence | GATCTATGCTGCATCCAGTTTGCAAAGTGGGGTCCCATCAAGGTTCAGTGGCAGTGGATCTGGGACAGAT |
| | | TTCACTCTCACCATCAGCAGTCTGCAACCTGAAGATTTTGCAACTTACTACTGTCAGCAAAGCCACAGTG |
| | | CCCCTACTTTTGGCGGAGGGACCAAGGTTGAGATCAAA |
| 645 | BIIB-12-933_VL | EIVLTQSPGTLSLSPGERATLSCRASQSVSSSYLAWYQQKPGQAPRLLIYGASSRATGIPDRFSGSGSGT |
| | Amino Acid | DFTLTISRLEPEDFAVYYCQQYSRSPITFGGGTKVEIK |
| | Sequence | |
| 646 | BIIB-12-933_VL | GAAATTGTGTTGACGCAGTCTCCAGGCACCCTGTCTTTGTCTCCAGGGGAAAGAGCCACCCTCTCCTGCA |
| | Nucleic Acid | GGGCCAGTCAGAGTGTTAGCAGCAGCTACTTAGCCTGGTACCAGCAGAAACCTGGCCAGGCTCCCAGGCT |
| | Sequence | CCTCATCTATGGTGCATCCAGCAGGGCCACTGGCATCCCAGACAGGTTCAGTGGCAGTGGGTCTGGGACA |
| | | GACTTCACTCTCACCATCAGCAGACTGGAGCCTGAAGATTTTGCAGTGTATTACTGTCAGCAGTACTCCC |
| | | GCTCCCCTATCACTTTTGGCGGAGGGACCAAGGTTGAGATCAAA |
| 647 | BIIB-12-934_VL | EIVLTQSPATLSVSPGERATLSCRASQSVSSNLAWYQQKPGQAPRLLIYGASTRATGIPARFSGSGSGTE |
| | Amino Acid | FTLTISSLQSEDFAVYYCQQFNDHPITFGGGTKVEI |
| | Sequence | |
| 648 | BIIB-12-934_VL | GAAATAGTGTTGACGCAGTCTCCAGCCACCCTGTCTGTGTCTCCAGGGGAAAGAGCCACCCTCTCCTGCA |
| | Nucleic Acid | GGGCCAGTCAGAGTGTTAGCAGCAACTTAGCCTGGTACCAGCAGAAACCTGGCCAGGCTCCCAGGCTCCT |
| | Sequence | CATCTATGGTGCATCCACCAGGGCCACTGGTATCCCAGCCAGGTTCAGTGGCAGTGGGTCTGGGACAGAG |
| | | TTCACTCTCACCATCAGCAGCCTGCAGTCTGAAGATTTTGCAGTTTATTACTGTCAGCAGTTCAATGACC |
| | | ACCCTATCACTTTTGGCGGAGGGACCAAGGTTGAGATCAAA |
| 649 | BIIB-12-935_VL | EIVLTQSPGTLSLSPGERATLSCRASQSVSSSFLAWYQQKPGQAPRLLIYGASSRATGIPDRFSGSGSGT |
| | Amino Acid | DFTLTISRLEPEDFAVYYCQQYSSSPITFGGGTKVEIK |
| | Sequence | |
| 650 | BIIB-12-935_VL | GAAATTGTGTTGACGCAGTCTCCAGGCACCCTGTCTTTGTCTCCAGGGGAAAGAGCCACCCTCTCCTGCA |
| | Nucleic Acid | GGGCCAGTCAGAGTGTTAGCAGCAGCTTCTTAGCCTGGTACCAGCAGAAACCTGGCCAGGCTCCCAGGCT |
| | Sequence | CCTCATCTATGGTGCATCCAGCAGGGCCACTGGCATCCCAGACAGGTTCAGTGGCAGTGGGTCTGGGACA |
| | | GACTTCACTCTCACCATCAGCAGACTGGAGCCTGAAGATTTTGCAGTGTATTACTGTCAGCAGTACTCCA |
| | | GTTCCCCTATCACTTTTGGCGGAGGGACCAAGGTTGAGATCAAA |
| 651 | BIIB-12-936_VL | EIVMTQSPATLSVSPGERATLSCRASQSVSSNLAWYQQKPGQAPRLLIYGASTRATGIPARFSGSGSGTE |
| | Amino Acid | FTLTISSLQSEDFAVYYCQQSHNLPPTFGGGTKVEIK |
| | Sequence | |
| 652 | BIIB-12-936_VL | GAAATAGTGATGACGCAGTCTCCAGCCACCCTGTCTGTGTCTCCAGGGGAAAGAGCCACCCTCTCCTGCA |
| | Nucleic Acid | GGGCCAGTCAGAGTGTTAGCAGCAACTTAGCCTGGTACCAGCAGAAACCTGGCCAGGCTCCCAGGCTCCT |
| | Sequence | CATCTATGGTGCATCCACCAGGGCCACTGGTATCCCAGCCAGGTTCAGTGGCAGTGGGTCTGGGACAGAG |
| | | TTCACTCTCACCATCAGCAGCCTGCAGTCTGAAGATTTTGCAGTTTATTACTGTCAGCAGTCCCACAATC |
| | | TCCCTCCTACTTTTGGCGGAGGGACCAAGGTTGAGATCAAA |
| 653 | BIIB-12-937_VL | DIVMTQSPLSLPVTPGEPASISCRSSQSLLHSNGYNYLDWYLQKPGQSPQLLIYLGSNRASGVPDRFSGS |
| | Amino Acid | GSGTDFTLKISRVEAEDVGVYYCMQERQTPLTFGGGTKVEIK |
| | Sequence | |
| 654 | BIIB-12-937_VL | GATATTGTGATGACTCAGTCTCCACTCTCCCTGCCCGTCACCCCTGGAGAGCCGGCCTCCATCTCCTGCA |
| | Nucleic Acid | GGTCTAGTCAGAGCCTCCTGCATAGTAATGGATACAACTATTTGGATTGGTACCTGCAGAAGCCAGGGCA |
| | Sequence | GTCTCCACAGCTCCTGATCTATTTGGGTTCTAATCGGGCCTCCGGGGTCCCTGACAGGTTCAGTGGCAGT |
| | | GGATCAGGCACAGATTTTACACTGAAAATCAGCAGAGTGGAGGCTGAGGATGTTGGGGTTTATTACTGCA |
| | | TGCAGGAAAGACAAACTCCTCTCACTTTTGGCGGAGGGACCAAGGTTGAGATCAAA |
| 655 | BIIB-12-1288_VL | DIVMTQSPDSLAVSLGERATINCKSSQSVLYSSNNKNYLAWYQQKPGQPPKLLIYWASTRESGVPDRFSG |
| | Amino Acid | SGSGTDFTLTISSLQAEDVAVYYCQQSFNTPFTFGGGTKVEIK |
| | Sequence | |
| 656 | BIIB-12-1288_VL | GACATCGTGATGACCCAGTCTCCAGACTCCCTGGCTGTGTCTCTGGGCGAGAGGGCCACCATCAACTGCA |
| | Nucleic Acid | AGTCCAGCCAGAGTGTTTTATACAGCTCCAACAATAAGAACTACTTAGCTTGGTACCAGCAGAAACCAGG |
| | Sequence | ACAGCCTCCTAAGCTGCTCATTTACTGGGCATCTACCCGGGAATCCGGGGTCCCTGACCGATTCAGTGGC |
| | | AGCGGGTCTGGGACAGATTTCACTCTCACCATCAGCAGCCTGCAGGCTGAAGATGTGGCAGTTTATTACT |
| | | GTCAGCAGTCCTTCAACACTCCTTTCACTTTTGGCGGAGGGACCAAGGTTGAGATCAAA |
| 657 | BIIB-12-1289_VL | DIVMTQSPDSLAVSLGERATINCKSSQSVLYSSNNKNYLAWYQQKPGQPPKLLIYWASTRESGVPDRFSG |
| | Amino Acid | SGSGTDFTLTISSLQAEDVAVYYCQQYYASPFTFGGGTKVEIK |
| | Sequence | |
| 658 | BIIB-12-1289_VL | GACATCGTGATGACCCAGTCTCCAGACTCCCTGGCTGTGTCTCTGGGCGAGAGGGCCACCATCAACTGCA |
| | Nucleic Acid | AGTCCAGCCAGAGTGTTTTATACAGCTCCAACAATAAGAACTACTTAGCTTGGTACCAGCAGAAACCAGG |
| | Sequence | ACAGCCTCCTAAGCTGCTCATTTACTGGGCATCTACCCGGGAATCCGGGGTCCCTGACCGATTCAGTGGC |
| | | AGCGGGTCTGGGACAGATTTCACTCTCACCATCAGCAGCCTGCAGGCTGAAGATGTGGCAGTTTATTACT |
| | | GTCAGCAGTACTACGCCTCCCCTTTCACTTTTGGCGGAGGGACCAAGGTTGAGATCAAA |
| 659 | BIIB-12-1290_VL | DIQMTQSPSSVSASVGDRVTITCRASQGISSWLAWYQQKPGKAPKLLIYAASSLQSGVPSRFSGSGSGTD |
| | Amino Acid | FTLTISSLQPEDFATYYCQQGFSFPFTFGGGTKVEIK |
| | Sequence | |
| 660 | BIIB-12-1290_VL | GACATCCAGATGACCCAGTCTCCATCTTCCGTGTCTGCATCTGTAGGAGACAGAGTCACCATCACTTGTC |
| | Nucleic Acid | GGGCGAGTCAGGGTATTAGCAGCTGGTTAGCCTGGTATCAGCAGAAACCAGGGAAAGCCCCTAAGCTCCT |
| | Sequence | GATCTATGCTGCATCCAGTTTGCAAAGTGGGGTCCCATCAAGGTTCAGCGGCAGTGGATCTGGGACAGAT |
| | | TTCACTCTCACCATCAGCAGCCTGCAGCCTGAAGATTTTGCAACTTATTACTGTCAGCAGGGATTCAGTT |
| | | TCCCTTTCACTTTTGGCGGAGGGACCAAGGTTGAGATCAAA |
| 661 | BIIB-12-1291_VL | EIVLTQSPATLSLSPGERATLSCRASQSVSSYLAWYQQKPGQAPRLLIYDASNRATGIPARFSGSGSGTD |
| | Amino Acid | FTLTISSLEPEDFAVYYCQQRLNLPLTFGGGTKVEIK |
| | Sequence | |
| 662 | BIIB-12-1291_VL | GAAATTGTGTTGACACAGTCTCCAGCCACCCTGTCTTTGTCTCCAGGGGAAAGAGCCACCCTCTCCTGCA |
| | Nucleic Acid | GGGCCAGTCAGAGTGTTAGCAGCTACTTAGCCTGGTACCAACAGAAACCTGGCCAGGCTCCCAGGCTCCT |
| | Sequence | CATCTATGATGCATCCAACAGGGCCACTGGCATCCCAGCCAGGTTCAGTGGCAGTGGGTCTGGGACAGAC |
| | | TTCACTCTCACCATCAGCAGCCTAGAGCCTGAAGATTTTGCAGTTTATTACTGTCAGCAGAGACTCAATC |
| | | TCCCTCTCACTTTTGGCGGAGGGACCAAGGTTGAGATCAA |
| 663 | BIIB-12-1292_VL | EIVMTQSPATLSLSPGERATLSCRASQSVSSYLAWYQQKPGQAPRLLIYDSSNRATGIPARFSGSGSGTD |
| | Amino Acid | FTLTISSLEPEDFAVYYCQQRLNFPFTFGGGTKVEIK |
| | Sequence | |
| 664 | BIIB-12-1292_VL | GAAATTGTGATGACACAGTCTCCAGCCACCCTGTCTTTGTCTCCAGGGGAAAGAGCCACCCTCTCCTGCA |
| | Nucleic Acid | GGGCCAGTCAGAGTGTTAGCAGCTACTTAGCCTGGTACCAACAGAAACCTGGCCAGGCTCCCAGGCTCCT |
| | Sequence | CATCTATGATTCATCCAACAGGGCCACTGGCATCCCAGCCAGGTTCAGTGGCAGTGGGTCTGGGACAGAC |
| | | TTCACTCTCACCATCAGCAGCCTAGAGCCTGAAGATTTTGCAGTTTATTACTGTCAGCAGAGACTCAATT |
| | | TCCCTTTCACTTTTGGCGGAGGGACCAAGGTTGAGATCAAA |
| 665 | BIIB-12-1293_VL | DIQMTQSPSSVSASVGDRVTITCRASQGISSWLAWYQQKPGKAPKLLIYAASSLQSGVPSRFSGSGSGTD |
| | Amino Acid | FTLTISSLQPEDFATYYCQQANIFPFTFGGGTKVEIK |
| | Sequence | |
| 666 | BIIB-12-1293_VL | GACATCCAGATGACCCAGTCTCCATCTTCCGTGTCTGCATCTGTAGGAGACAGAGTCACCATCACTTGTC |
| | Nucleic Acid | GGGCGAGTCAGGGTATTAGCAGCTGGTTAGCCTGGTATCAGCAGAAACCAGGGAAAGCCCCTAAGCTCCT |
| | Sequence | GATCTATGCTGCATCCAGTTTGCAAAGTGGGGTCCCATCAAGGTTCAGCGGCAGTGGATCTGGGACAGAT |
| | | TTCACTCTCACCATCAGCAGCCTGCAGCCTGAAGATTTTGCAACTTATTACTGTCAGCAGGCAAATATCT |
| | | TCCCTTTCACTTTTGGCGGAGGGACCAAGGTTGAGATCAAA |
| 667 | BIIB-12-1294_VL | DIQMTQSPSTLSASVGDRVTITCRASQSISSWLAWYQQKPGKAPKLLIYKASSLESGVPSRFSGSGSGTE |
| | Amino Acid | FTLTISSLQPDDFATYYCQQVNTFPFTFGGGTKVEIK |
| | Sequence | |
| 668 | BIIB-12-1294_VL | GACATCCAGATGACCCAGTCTCCTTCCACCCTGTCTGCATCTGTAGGAGACAGAGTCACCATCACTTGCC |
| | Nucleic Acid | GGGCCAGTCAGAGTATTAGTAGCTGGTTGGCCTGGTATCAGCAGAAACCAGGGAAAGCCCCTAAGCTCCT |
| | Sequence | GATCTATAAAGCCTCCAGTTTGGAAAGTGGGGTCCCATCAAGGTTCAGCGGCAGTGGATCTGGGACAGAA |
| | | TTCACTCTCACCATCAGCAGCCTGCAGCCTGATGATTTTGCAACTTATTACTGCCAGCAGGTCAATACCT |
| | | TCCCTTTCACTTTTGGCGGAGGGACCAAGGTTGAGATCAAA |
| 669 | BIIB-12-1295_VL | DIQMTQSPSSVSASVGDRVTITCRASQGISSWLAWYQQKPGKAPKLLIYAASNLQSGVPSRFSGSGSGTD |
| | Amino Acid | FTLTISSLQPEDFATYYCQQAISLPITFGGGTKVEIK |
| | Sequence | |
| 670 | BIIB-12-1295_VL | GACATCCAGATGACCCAGTCTCCATCTTCCGTGTCTGCATCTGTAGGAGACAGAGTCACCATCACTTGTC |
| | Nucleic Acid | GGGCGAGTCAGGGTATTAGCAGCTGGTTAGCCTGGTATCAGCAGAAACCAGGGAAAGCCCCTAAGCTCCT |
| | Sequence | GATCTATGCTGCATCCAATTTGCAAAGTGGGGTCCCATCAAGGTTCAGCGGCAGTGGATCTGGGACAGAT |
| | | TTCACTCTCACCATCAGCAGCCTGCAGCCTGAAGATTTTGCAACTTATTACTGTCAGCAGGCAATCAGTC |
| | | TCCCTATCACTTTTGGCGGAGGGACCAAGGTTGAGATCAAA |
| 671 | BIIB-12-1296_VL | EIVLTQSPGTLSLSPGERATLSCRASQSVSSSYLAWYQQKPGQAPRLLIYGASSRATGIPDRFSGSGSGT |
| | Amino Acid | DFTLTISRLEPEDFAVYYCQQYADSPLTFGGGTKVEIK |
| | Sequence | |
| 672 | BIIB-12-1296_VL | GAAATTGTGTTGACGCAGTCTCCAGGCACCCTGTCTTTGTCTCCAGGGGAAAGAGCCACCCTCTCCTGCA |
| | Nucleic Acid | GGGCCAGTCAGAGTGTTAGCAGCAGCTACTTAGCCTGGTACCAGCAGAAACCTGGCCAGGCTCCCAGGCT |
| | Sequence | CCTCATCTATGGTGCATCCAGCAGGGCCACTGGCATCCCAGACAGGTTCAGTGGCAGTGGGTCTGGGACA |
| | | GACTTCACTCTCACCATCAGCAGACTGGAGCCTGAAGATTTTGCAGTGTATTACTGTCAGCAGTACGCCG |
| | | ACAGTCCTCTCACTTTTGGCGGAGGGACCAAGGTTGAGATCAAA |
| 673 | BIIB-12-1297_VL | EIVLTQSPATLSLSPGERATLSCRASQSVSRYLAWYQQKPGQAPRLLIYDASNRATGIPARFSGSGSGTD |
| | Amino Acid | FTLTISSLEPEDFAVYYCQQGNNWPPTFGGGTKVEIK |
| | Sequence | |
| 674 | BIIB-12-1297_VL | GAAATTGTGTTGACACAGTCTCCAGCCACCCTGTCTTTGTCTCCAGGGGAAAGAGCCACCCTCTCCTGCA |
| | Nucleic Acid | GGGCCAGTCAGAGTGTTAGCAGGTACTTAGCCTGGTACCAACAGAAACCTGGCCAGGCTCCCAGGCTCCT |
| | Sequence | CATCTATGATGCATCCAACAGGGCCACTGGCATCCCAGCCAGGTTCAGTGGCAGTGGGTCTGGGACAGAC |
| | | TTCACTCTCACCATCAGCAGCCTAGAGCCTGAAGATTTTGCAGTTTATTACTGTCAGCAGGGCAACAATT |
| | | GGCCTCCTACTTTTGGCGGAGGGACCAAGGTTGAGATCAAA |
| 675 | BIIB-12-1298_VL | DIQMTQSPSSVSASVGDRVTITCRASQGISSWLAWYQQKPGKAPKLLIYAASSLQSGVPSRFSGSGSGTD |
| | Amino Acid | FTLTISSLQPEDFATYYCQQTNSLPITFGGGTKVEIK |
| | Sequence | |
| 676 | BIIB-12-1298_VL | GACATCCAGATGACCCAGTCTCCATCTTCCGTGTCTGCATCTGTAGGAGACAGAGTCACCATCACTTGTC |
| | Nucleic Acid | GGGCGAGTCAGGGTATTAGCAGCTGGTTAGCCTGGTATCAGCAGAAACCAGGGAAAGCCCCTAAGCTCCT |
| | Sequence | GATCTATGCTGCATCCAGTTTGCAAAGTGGGGTCCCATCAAGGTTCAGCGGCAGTGGATCTGGGACAGAT |
| | | TTCACTCTCACCATCAGCAGCCTGCAGCCTGAAGATTTTGCAACTTATTACTGTCAGCAGACAAATAGTC |
| | | TCCCTATCACTTTTGGCGGAGGGACCAAGGTTGAGATCAAA |
| 677 | BIIB-12-1299_VL | EIVMTQSPATLSVSPGERATLSCRASQSVSSNLAWYQQKPGQAPRLLIYGASTRATGIPARFSGSGSGTE |
| | Amino Acid | FTLTISSLQSEDFAVYYCQQLNNFPITFGGGTKVEIK |
| | Sequence | |
| 678 | BIIB-12-1299_VL | GAAATAGTGATGACGCAGTCTCCAGCCACCCTGTCTGTGTCTCCAGGGGAAAGAGCCACCCTCTCCTGCA |
| | Nucleic Acid | GGGCCAGTCAGAGTGTTAGCAGCAACTTAGCCTGGTACCAGCAGAAACCTGGCCAGGCTCCCAGGCTCCT |
| | Sequence | CATCTATGGTGCATCCACCAGGGCCACTGGTATCCCAGCCAGGTTCAGTGGCAGTGGGTCTGGGACAGAG |
| | | TTCACTCTCACCATCAGCAGCCTGCAGTCTGAAGATTTTGCAGTTTATTACTGTCAGCAGCTCAATAATT |
| | | TCCCTATCACTTTTGGCGGAGGGACCAAGGTTGAGATCAAA |
| 679 | BIIB-12-1300_VL | DIQMTQSPSSVSASVGDRVTITCRASQGISSWLAWYQQKPGKAPKLLIYAASSLQSGVPSRFSGSGSGTD |
| | Amino Acid | FTLTISSLQPEDFATYYCQQASSFPPTFGGGTKVEIK |
| | Sequence | |
| 680 | BIIB-12-1300_VL | GACATCCAGATGACCCAGTCTCCATCTTCCGTGTCTGCATCTGTAGGAGACAGAGTCACCATCACTTGTC |
| | Nucleic Acid | GGGCGAGTCAGGGTATTAGCAGCTGGTTAGCCTGGTATCAGCAGAAACCAGGGAAAGCCCCTAAGCTCCT |
| | Sequence | GATCTATGCTGCATCCAGTTTGCAAAGTGGGGTCCCATCAAGGTTCAGCGGCAGTGGATCTGGGACAGAT |
| | | TTCACTCTCACCATCAGCAGCCTGCAGCCTGAAGATTTTGCAACTTATTACTGTCAGCAGGCATCCAGTT |
| | | TCCCTCCTACTTTTGGCGGAGGGACCAAGGTTGAGATCAAA |
| 681 | BIIB-12-1301_VL | EIVLTQSPATLSLSPGERATLSCRASQSVSSYLAWYQQKPGQAPRLLIYDASKRATGIPARFSGSGSGTD |
| | Amino Acid | FTLTISSLEPEDFAVYYCQQSSSWPPTFGGGTKVEIK |
| | Sequence | |
| 682 | BIIB-12-1301_VL | GAAATTGTGTTGACACAGTCTCCAGCCACCCTGTCTTTGTCTCCAGGGGAAAGAGCCACCCTCTCCTGCA |
| | Nucleic Acid | GGGCCAGTCAGAGTGTTAGCAGCTACTTAGCCTGGTACCAACAGAAACCTGGCCAGGCTCCCAGGCTCCT |
| | Sequence | CATCTATGATGCATCCAAAAGGGCCACTGGCATCCCAGCCAGGTTCAGTGGCAGTGGGTCTGGGACAGAC |
| | | TTCACTCTCACCATCAGCAGCCTAGAGCCTGAAGATTTTGCAGTTTATTACTGTCAGCAGTCCAGTTCCT |
| | | GGCCTCCTACTTTTGGCGGAGGGACCAAGGTTGAGATCAAA |
| 683 | BIIB-12-1302_VL | EIVMTQSPATLSVSPGERATLSCRASQSVSSNLAWYQQKPGQAPRLLIYGASTRATGIPARFSGSGSGTE |
| | Amino Acid | FTLTISSLQSEDFAVYYCQQVNNLPLTFGGGTKVEIK |
| | Sequence | |
| 684 | BIIB-12-1302_VL | GAAATAGTGATGACGCAGTCTCCAGCCACCCTGTCTGTGTCTCCAGGGGAAAGAGCCACCCTCTCCTGCA |
| | Nucleic Acid | GGGCCAGTCAGAGTGTTAGCAGCAACTTAGCCTGGTACCAGCAGAAACCTGGCCAGGCTCCCAGGCTCCT |
| | Sequence | CATCTATGGTGCATCCACCAGGGCCACTGGTATCCCAGCCAGGTTCAGTGGCAGTGGGTCTGGGACAGAG |
| | | TTCACTCTCACCATCAGCAGCCTGCAGTCTGAAGATTTTGCAGTTTATTACTGTCAGCAGGTCAATAATC |
| | | TCCCTCTCACTTTTGGCGGAGGGACCAAGGTTGAGATCAAA |
| 685 | BIIB-12-1303_VL | DIQMTQSPSSLSASVGDRVTITCRASQSISSYLNWYQQKPGKAPKLLIYAASSLQSGVPSRFSGSGSGTD |
| | Amino Acid | FTLTISSLQPEDFATYYCQQAYSLPITFGGGTKVEIK |
| | Sequence | |
| 686 | BIIB-12-1303_VL | GACATCCAGATGACCCAGTCTCCATCCTCCCTGTCTGCATCTGTAGGAGACAGAGTCACCATCACTTGCC |
| | Nucleic Acid | GGGCAAGTCAGAGCATTAGCAGCTATTTAAATTGGTATCAGCAGAAACCAGGGAAAGCCCCTAAGCTCCT |
| | Sequence | GATCTATGCTGCATCCAGTTTGCAAAGTGGGGTCCCATCAAGGTTCAGTGGCAGTGGATCTGGGACAGAT |
| | | TTCACTCTCACCATCAGCAGTCTGCAACCTGAAGATTTTGCAACTTACTACTGTCAGCAAGCATACAGTC |
| | | TCCCTATCACTTTTGGCGGAGGGACCAAGGTTGAGATCAAA |
| 687 | BIIB-12-1304_VL | EIVMTQSPATLSVSPGERATLSCRASQSVSSNLAWYQQKPGQAPRLLIYGASTRATGIPARFSGSGSGTE |
| | Amino Acid | FTLTISSLQSEDFAVYYCQQANVLPLTFGGGTKVEIK |
| | Sequence | |
| 688 | BIIB-12-1304_VL | GAAATAGTGATGACGCAGTCTCCAGCCACCCTGTCTGTGTCTCCAGGGGAAAGAGCCACCCTCTCCTGCA |
| | Nucleic Acid | GGGCCAGTCAGAGTGTTAGCAGCAACTTAGCCTGGTACCAGCAGAAACCTGGCCAGGCTCCCAGGCTCCT |
| | Sequence | CATCTATGGTGCATCCACCAGGGCCACTGGTATCCCAGCCAGGTTCAGTGGCAGTGGGTCTGGGACAGAG |
| | | TTCACTCTCACCATCAGCAGCCTGCAGTCTGAAGATTTTGCAGTTTATTACTGTCAGCAGGCCAATGTCC |
| | | TTCCTCTCACTTTTGGCGGAGGGACCAAGGTTGAGATCAAA |
| 689 | BIIB-12-1305_VL | EIVLTQSPATLSLSPGERATLSCRASQSVSSYLAWYQQKPGQAPRLLIYDASNRATGIPARFSGSGSGTD |
| | Amino Acid | FTLTISSLEPEDFAVYYCQQSANWPPTFGGGTKVEIK |
| | Sequence | |
| 690 | BIIB-12-1305_VL | GAAATTGTGTTGACACAGTCTCCAGCCACCCTGTCTTTGTCTCCAGGGGAAAGAGCCACCCTCTCCTGCA |
| | Nucleic Acid | GGGCCAGTCAGAGTGTTAGCAGCTACTTAGCCTGGTACCAACAGAAACCTGGCCAGGCTCCCAGGCTCCT |
| | Sequence | CATCTATGATGCATCCAACAGGGCCACTGGCATCCCAGCCAGGTTCAGTGGCAGTGGGTCTGGGACAGAC |
| | | TTCACTCTCACCATCAGCAGCCTAGAGCCTGAAGATTTTGCAGTTTATTACTGTCAGCAGTCCGCCAATT |
| | | GGCCTCCTACTTTTGGCGGAGGGACCAAGGTTGAGATCAAA |
| 691 | BIIB-12-1306_VL | DIVMTQSPDSLAVSLGERATINCKSSQSVLYSSNNKNYLAWYQQKPGQPPKLLIYWASTRESGVPDRFSG |
| | Amino Acid | SGSGTDFTLTISSLQAEDVAVYYCQQSVNTPLTFGGGTKVEIK |
| | Sequence | |
| 692 | BIIB-12-1306_VL | GACATCGTGATGACCCAGTCTCCAGACTCCCTGGCTGTGTCTCTGGGCGAGAGGGCCACCATCAACTGCA |
| | Nucleic Acid | AGTCCAGCCAGAGTGTTTTATACAGCTCCAACAATAAGAACTACTTAGCTTGGTACCAGCAGAAACCAGG |
| | Sequence | ACAGCCTCCTAAGCTGCTCATTTACTGGGCATCTACCCGGGAATCCGGGGTCCCTGACCGATTCAGTGGC |
| | | AGCGGGTCTGGGACAGATTTCACTCTCACCATCAGCAGCCTGCAGGCTGAAGATGTGGCAGTTTATTACT |
| | | GTCAGCAGTCCGTCAACACTCCTCTCACTTTTGGCGGAGGGACCAAGGTTGAGATCAAA |
| 693 | BIIB-12-1307_VL | DIQLTQSPSSLSASVGDRVTITCRASQSISSFLNWYQQKPGKAPKLLIYAASSLQSGVPSRFSGSGSGTD |
| | Amino Acid | FTLTISSLQPEDFATYYCQQTYSTPLTFGGGTKVEIK |
| | Sequence | |
| 694 | BIIB-12-1307_VL | GACATCCAGTTGACCCAGTCTCCATCCTCCCTGTCTGCATCTGTAGGAGACAGAGTCACCATCACTTGCC |
| | Nucleic Acid | GGGCAAGTCAGAGCATTAGCAGCTTTTTAAATTGGTATCAGCAGAAACCAGGGAAAGCCCCTAAGCTCCT |
| | Sequence | GATCTATGCTGCATCCAGTTTGCAAAGTGGGGTCCCATCAAGGTTCAGTGGCAGTGGATCTGGGACAGAT |
| | | TTCACTCTCACCATCAGCAGTCTGCAACCTGAAGATTTTGCAACTTACTACTGTCAGCAAACATACAGTA |
| | | CTCCTCTCACTTTTGGCGGAGGGACCAAGGTTGAGATCAAA |
| 695 | BIIB-12-1308_VL | EIVLTQSPGTLSLSPGERATLSCRASQSVSSDYLAWYQQKPGQAPRLLIYGASSRATGIPDRFSGSGSGT |
| | Amino Acid | DFTLTISRLEPEDFAVYYCQQAGSFPPTFGGGTKVEIK |
| | Sequence | |
| 696 | BIIB-12-1308_VL | GAAATTGTGTTGACGCAGTCTCCAGGCACCCTGTCTTTGTCTCCAGGGGAAAGAGCCACCCTCTCCTGCA |
| | Nucleic Acid | GGGCCAGTCAGAGTGTTAGCAGCGACTACTTAGCCTGGTACCAGCAGAAACCTGGCCAGGCTCCCAGGCT |
| | Sequence | CCTCATCTATGGTGCATCCAGCAGGGCCACTGGCATCCCAGACAGGTTCAGTGGCAGTGGGTCTGGGACA |
| | | GACTTCACTCTCACCATCAGCAGACTGGAGCCTGAAGATTTTGCAGTGTATTACTGTCAGCAGGCCGGAA |
| | | GTTTCCCTCCTACTTTTGGCGGAGGGACCAAGGTTGAGATCAAA |
| 697 | BIIB-12-1309_VL | DIQMTQSPSSVSASVGDRVTITCRASQGISSWLAWYQQKPGKAPKLLIYAASSLQSGVPSRFSGSGSGTD |
| | Amino Acid | FTLTISSLQPEDFATYYCQQANSLPITFGGGTKVEIK |
| | Sequence | |
| 698 | BIIB-12-1309_VL | GACATCCAGATGACCCAGTCTCCATCTTCCGTGTCTGCATCTGTAGGAGACAGAGTCACCATCACTTGTC |
| | Nucleic Acid | GGGCGAGTCAGGGTATTAGCAGCTGGTTAGCCTGGTATCAGCAGAAACCAGGGAAAGCCCCTAAGCTCCT |
| | Sequence | GATCTATGCTGCATCCAGTTTGCAAAGTGGGGTCCCATCAAGGTTCAGCGGCAGTGGATCTGGGACAGAT |
| | | TTCACTCTCACCATCAGCAGCCTGCAGCCTGAAGATTTTGCAACTTATTACTGTCAGCAGGCAAATTCCC |
| | | TCCCTATCACTTTTGGCGGAGGGACCAAGGTTGAGATCAAA |
| 699 | BIIB-12-1310_VL | EIVLTQSPATLSLSPGERATLSCRASQSVSRYLAWYQQKPGQAPRLLIYDASNRATGIPARFSGSGSGTD |
| | Amino Acid | FTLTISSLEPEDFAVYYCEQASNWPPTFGGGTKVEIK |
| | Sequence | |
| 700 | BIIB-12-1310_VL | GAAATTGTGTTGACACAGTCTCCAGCCACCCTGTCTTTGTCTCCAGGGGAAAGAGCCACCCTCTCCTGCA |
| | Nucleic Acid | GGGCCAGTCAGAGTGTTAGCAGGTACTTAGCCTGGTACCAACAGAAACCTGGCCAGGCTCCCAGGCTCCT |
| | Sequence | CATCTATGATGCATCCAACAGGGCCACTGGCATCCCAGCCAGGTTCAGTGGCAGTGGGTCTGGGACAGAC |
| | | TTCACTCTCACCATCAGCAGCCTAGAGCCTGAAGATTTTGCAGTTTATTACTGTGAACAGGCCAGTAATT |
| | | GGCCTCCTACTTTTGGCGGAGGGACCAAGGTTGAGATCAAA |
| 701 | BIIB-12-1311_VL | EIVLTQSPATLSLSPGERATLSCRASQSVSSYLAWYQQKPGQAPRLLIYDASNRATGIPARFSGSGSGTD |
| | Amino Acid | FTLTISSLEPEDFAVYYCQQASNLPPTFGGGTKVEIK |
| | Sequence | |
| 702 | BIIB-12-1311_VL | GAAATTGTGTTGACACAGTCTCCAGCCACCCTGTCTTTGTCTCCAGGGGAAAGAGCCACCCTCTCCTGCA |
| | Nucleic Acid | GGGCCAGTCAGAGTGTTAGCAGCTACTTAGCCTGGTACCAACAGAAACCTGGCCAGGCTCCCAGGCTCCT |
| | Sequence | CATCTATGATGCATCCAACAGGGCCACTGGCATCCCAGCCAGGTTCAGTGGCAGTGGGTCTGGGACAGAC |
| | | TTCACTCTCACCATCAGCAGCCTAGAGCCTGAAGATTTTGCAGTTTATTACTGTCAGCAGGCCTCCAATC |
| | | TCCCTCCTACTTTTGGCGGAGGGACCAAGGTTGAGATCAA |
| 703 | BIIB-12-1312_VL | DIQMTQSPSSVSASVGDRVTITCRASQGISSWLAWYQQKPGKAPKLLIYAASSLQSGVPSRFSGSGSGTD |
| | Amino Acid | FTLTISSLQPEDFATYYCQQASSFPPTFGGGTKVEIK |
| | Sequence | |
| 704 | BIIB-12-1312_VL | GACATCCAGATGACCCAGTCTCCATCTTCCGTGTCTGCATCTGTAGGAGACAGAGTCACCATCACTTGTC |
| | Nucleic Acid | GGGCGAGTCAGGGTATTAGCAGCTGGTTAGCCTGGTATCAGCAGAAACCAGGGAAAGCCCCTAAGCTCCT |
| | Sequence | GATCTATGCTGCATCCAGTTTGCAAAGTGGGGTCCCATCAAGGTTCAGCGGCAGTGGATCTGGGACAGAT |
| | | TTCACTCTCACCATCAGCAGCCTGCAGCCTGAAGATTTTGCAACTTATTACTGTCAGCAGGCATCCAGTT |
| | | TCCCTCCTACTTTTGGCGGAGGGACCAAGGTTGAGATCAAA |
| 705 | BIIB-12-1313_VL | EIVMTQSPATLSVSPGERATLSCRASQSVSSNLAWYQQKPGQAPRLLIYGASTRATGIPARFSGSGSGTE |
| | Amino Acid | FTLTISSLQSEDFAVYYCQQHNHLPITFGGGTKVEIK |
| | Sequence | |
| 706 | BIIB-12-1313_VL | GAAATAGTGATGACGCAGTCTCCAGCCACCCTGTCTGTGTCTCCAGGGGAAAGAGCCACCCTCTCCTGCA |
| | Nucleic Acid | GGGCCAGTCAGAGTGTTAGCAGCAACTTAGCCTGGTACCAGCAGAAACCTGGCCAGGCTCCCAGGCTCCT |
| | Sequence | CATCTATGGTGCATCCACCAGGGCCACTGGTATCCCAGCCAGGTTCAGTGGCAGTGGGTCTGGGACAGAG |
| | | TTCACTCTCACCATCAGCAGCCTGCAGTCTGAAGATTTTGCAGTTTATTACTGTCAGCAGCACAATCACC |
| | | TCCCTATCACTTTTGGCGGAGGGACCAAGGTTGAGATCAAA |
| 707 | BIIB-12-1314_VL | DIQMTQSPSSVSASVGDRVTITCRASQGISSWLAWYQQKPGKAPKLLIYAASSLQSGVPSRFSGSGSGTD |
| | Amino Acid | FTLTISSLQPEDFATYYCQQANFFPITFGGGTKVEIK |
| | Sequence | |
| 708 | BIIB-12-1314_VL | GACATCCAGATGACCCAGTCTCCATCTTCCGTGTCTGCATCTGTAGGAGACAGAGTCACCATCACTTGTC |
| | Nucleic Acid | GGGCGAGTCAGGGTATTAGCAGCTGGTTAGCCTGGTATCAGCAGAAACCAGGGAAAGCCCCTAAGCTCCT |
| | Sequence | GATCTATGCTGCATCCAGTTTGCAAAGTGGGGTCCCATCAAGGTTCAGCGGCAGTGGATCTGGGACAGAT |
| | | TTCACTCTCACCATCAGCAGCCTGCAGCCTGAAGATTTTGCAACTTATTACTGTCAGCAGGCAAATTTCT |
| | | TCCCTATCACTTTTGGCGGAGGGACCAAGGTTGAGATCAAA |
| 709 | BIIB-12-1315_VL | EIVMTQSPATLSVSPGERATLSCRASQSVSSNLAWYQQKPGQAPRLLIYGASTRATGIPARFSGSGSGTE |
| | Amino Acid | FTLTISSLQSEDFAVYYCQQVFNWPPWTFGGGTKVEIK |
| | Sequence | |
| 710 | BIIB-12-1315_VL | GAAATAGTGATGACGCAGTCTCCAGCCACCCTGTCTGTGTCTCCAGGGGAAAGAGCCACCCTCTCCTGCA |
| | Nucleic Acid | GGGCCAGTCAGAGTGTTAGCAGCAACTTAGCCTGGTACCAGCAGAAACCTGGCCAGGCTCCCAGGCTCCT |
| | Sequence | CATCTATGGTGCATCCACCAGGGCCACTGGTATCCCAGCCAGGTTCAGTGGCAGTGGGTCTGGGACAGAG |
| | | TTCACTCTCACCATCAGCAGCCTGCAGTCTGAAGATTTTGCAGTTTATTACTGTCAGCAGGTCTTCAATT |
| | | GGCCTCCTTGGACTTTTGGCGGAGGGACCAAGGTTGAGATCAAA |
| 711 | BIIB-12-1316_VL | DIQMTQSPSSVSASVGDRVTITCRASQGISSWLAWYQQKPGKAPKLLIYAASSLQSGVPSRFSGSGSGTD |
| | Amino Acid | FTLTISSLQPEDFATYYCQQINNFPPTFGGGTKVEIK |
| | Sequence | |
| 712 | BIIB-12-1316_VL | GACATCCAGATGACCCAGTCTCCATCTTCCGTGTCTGCATCTGTAGGAGACAGAGTCACCATCACTTGTC |
| | Nucleic Acid | GGGCGAGTCAGGGTATTAGCAGCTGGTTAGCCTGGTATCAGCAGAAACCAGGGAAAGCCCCTAAGCTCCT |
| | Sequence | GATCTATGCTGCATCCAGTTTGCAAAGTGGGGTCCCATCAAGGTTCAGCGGCAGTGGATCTGGGACAGAT |
| | | TTCACTCTCACCATCAGCAGCCTGCAGCCTGAAGATTTTGCAACTTATTACTGTCAGCAGATAAATAACT |
| | | TCCCTCCTACTTTTGGCGGAGGGACCAAGGTTGAGATCAAA |
| 713 | BIIB-12-1317_VL | DIQMTQSPSSVSASVGDRVTITCRASQGISSWLAWYQQKPGKAPKLLIYAASSLQSGVPSRFSGSGSGTD |
| | Amino Acid | FTLTISSLQPEDFATYYCQQRHSLPPTFGGGTKVEIK |
| | Sequence | |
| 714 | BIIB-12-1317_VL | GACATCCAGATGACCCAGTCTCCATCTTCCGTGTCTGCATCTGTAGGAGACAGAGTCACCATCACTTGTC |
| | Nucleic Acid | GGGCGAGTCAGGGTATTAGCAGCTGGTTAGCCTGGTATCAGCAGAAACCAGGGAAAGCCCCTAAGCTCCT |
| | Sequence | GATCTATGCTGCATCCAGTTTGCAAAGTGGGGTCCCATCAAGGTTCAGCGGCAGTGGATCTGGGACAGAT |
| | | TTCACTCTCACCATCAGCAGCCTGCAGCCTGAAGATTTTGCAACTTATTACTGTCAGCAGAGACACAGTC |
| | | TCCCTCCTACTTTTGGCGGAGGGACCAAGGTTGAGATCAAA |
| 715 | BIIB-12-1318_VL | EIVLTQSPATLSLSPGERATLSCRASQSVSSYLAWYQQKPGQAPRLLIYDASNRATGIPARFSGSGSGTD |
| | Amino Acid | FTLTISSLEPEDFAVYYCQQLNNWPPTFGGGTKVEIK |
| | Sequence | |
| 716 | BIIB-12-1318_VL | GAAATTGTGTTGACACAGTCTCCAGCCACCCTGTCTTTGTCTCCAGGGGAAAGAGCCACCCTCTCCTGCA |
| | Nucleic Acid | GGGCCAGTCAGAGTGTTAGCAGCTACTTAGCCTGGTACCAACAGAAACCTGGCCAGGCTCCCAGGCTCCT |
| | Sequence | CATCTATGATGCATCCAACAGGGCCACTGGCATCCCAGCCAGGTTCAGTGGCAGTGGGTCTGGGACAGAC |
| | | TTCACTCTCACCATCAGCAGCCTAGAGCCTGAAGATTTTGCAGTTTATTACTGTCAGCAGCTCAACAATT |
| | | GGCCTCCTACTTTTGGCGGAGGGACCAAGGTTGAGATCAAA |
| 717 | BIIB-12-1319_VL | EIVMTQSPATLSVSPGERATLSCRASQSVSSNLAWYQQKPGQAPRLLIYGASTRATGIPARFSGSGSGTE |
| | Amino Acid | FTLTISSLQSEDFAVYYCQQASNFPPTFGGGTKVEI |
| | Sequence | |
| 718 | BIIB-12-1319_VL | GAAATAGTGATGACGCAGTCTCCAGCCACCCTGTCTGTGTCTCCAGGGGAAAGAGCCACCCTCTCCTGCA |
| | Nucleic Acid | GGGCCAGTCAGAGTGTTAGCAGCAACTTAGCCTGGTACCAGCAGAAACCTGGCCAGGCTCCCAGGCTCCT |
| | Sequence | CATCTATGGTGCATCCACCAGGGCCACTGGTATCCCAGCCAGGTTCAGTGGCAGTGGGTCTGGGACAGAG |
| | | TTCACTCTCACCATCAGCAGCCTGCAGTCTGAAGATTTTGCAGTTTATTACTGTCAGCAGGCCTCCAATT |
| | | TCCCTCCTACTTTTGGCGGAGGGACCAAGGTTGAGATCAAA |
| 719 | BIIB-12-1322_VL | DIVMTQSPDSLAVSLGERATINCKSSQSVLYSSNNKNYLAWYQQKPGQPPKLLISWASTRESGVPDRFSG |
| | Amino Acid | SGSGTDFTLTISSLQAEDVAVYYCQQSYFTPFTFGGGTKVEIK |
| | Sequence | |
| 720 | BIIB-12-1322_VL | ACATCGTGATGACCCAGTCTCCAGACTCCCTGGCTGTGTCTCTGGGCGAGAGGGCCACCATCAACTGCAA |
| | Nucleic Acid | GTCCAGCCAGAGTGTTTTATACAGCTCCAACAATAAGAACTACTTAGCTTGGTACCAGCAGAAACCAGGA |
| | Sequence | CAGCCTCCTAAGCTGCTCATTTCCTGGGCATCTACCCGGGAATCCGGGGTCCCTGACCGATTCAGTGGCA |
| | | GCGGGTCTGGGACAGATTTCACTCTCACCATCAGCAGCCTGCAGGCTGAAGATGTGGCAGTTTATTACTG |
| | | TCAGCAGTCCTACTTCACTCCTTTCACTTTTGGCGGAGGGACCAAGGTTGAGATCAAA |
| 721 | BIIB-12-1323_VL | DIQMTQSPSSVSASVGDRVTITCRASQGISSWLAWYQQKPGKAPKLLIYAASSLQSGVPSRFSGSGSGTD |
| | Amino Acid | FTLTISSLQPEDFATYYCQQANIFPFTFGGGTKVEIK |
| | Sequence | |
| 722 | BIIB-12-1323_VL | GACATCCAGATGACCCAGTCTCCATCTTCCGTGTCTGCATCTGTAGGAGACAGAGTCACCATCACTTGTC |
| | Nucleic Acid | GGGCGAGTCAGGGTATTAGCAGCTGGTTAGCCTGGTATCAGCAGAAACCAGGGAAAGCCCCTAAGCTCCT |
| | Sequence | GATCTATGCTGCATCCAGTTTGCAAAGTGGGGTCCCATCAAGGTTCAGCGGCAGTGGATCTGGGACAGAT |
| | | TTCACTCTCACCATCAGCAGCCTGCAGCCTGAAGATTTTGCAACTTATTACTGTCAGCAGGCAAATATCT |
| | | TCCCTTTCACTTTTGGCGGAGGGACCAAGGTTGAGATCAAA |
| 723 | BIIB-12-1324_VL | EIVMTQSPATLSLSPGERATLSCRASQSVSSYLAWYQQKPGQAPRLLIYDSSNRATGIPARFSGSGSGTD |
| | Amino Acid | FTLTISSLEPEDFAVYYCQQLVSWPTFGGGTKVEIK |
| | Sequence | |
| 724 | BIIB-12-1324_VL | GAAATTGTGATGACACAGTCTCCAGCCACCCTGTCTTTGTCTCCAGGGGAAAGAGCCACCCTCTCCTGCA |
| | Nucleic Acid | GGGCCAGTCAGAGTGTTAGCAGCTACTTAGCCTGGTACCAACAGAAACCTGGCCAGGCTCCCAGGCTCCT |
| | Sequence | CATCTATGATTCATCCAACAGGGCCACTGGCATCCCAGCCAGGTTCAGTGGCAGTGGGTCTGGGACAGAC |
| | | TTCACTCTCACCATCAGCAGCCTAGAGCCTGAAGATTTTGCAGTTTATTACTGTCAGCAGCTCGTCTCCT |
| | | GGCCTACTTTTGGCGGAGGGACCAAGGTTGAGATCAAA |
| 725 | BIIB-12-1325_VL | DIQMTQSPSTLSASVGDRVTITCRASQSISSWLAWYQQKPGKAPKLLIYKASSLESGVPSRFSGSGSGTE |
| | Amino Acid | FTLTISSLQPDDFATYYCQQSNRYPRTFGGGTKVEIK |
| | Sequence | |
| 726 | BIIB-12-1325_VL | GACATCCAGATGACCCAGTCTCCTTCCACCCTGTCTGCATCTGTAGGAGACAGAGTCACCATCACTTGCC |
| | Nucleic Acid | GGGCCAGTCAGAGTATTAGTAGCTGGTTGGCCTGGTATCAGCAGAAACCAGGGAAAGCCCCTAAGCTCCT |
| | Sequence | GATCTATAAAGCCTCCAGTTTGGAAAGTGGGGTCCCATCAAGGTTCAGCGGCAGTGGATCTGGGACAGAA |
| | | TTCACTCTCACCATCAGCAGCCTGCAGCCTGATGATTTTGCAACTTATTACTGCCAGCAGTCCAATCGCT |
| | | ACCCTAGGACTTTTGGCGGAGGGACCAAGGTTGAGATCAAA |
| 727 | BIIB-12-1326_VL | EIVLTQSPGTLSLSPGERATLSCRASQSVRSSYLAWYQQKPGQAPRLLIYGASSRATGIPDRFSGSGSGT |
| | Amino Acid | DFTLTISRLEPEDFAVYYCQQAYSSPLTFGGGTKVEIK |
| | Sequence | |
| 728 | BIIB-12-1326_VL | GAAATTGTGTTGACGCAGTCTCCAGGCACCCTGTCTTTGTCTCCAGGGGAAAGAGCCACCCTCTCCTGCA |
| | Nucleic Acid | GGGCCAGTCAGAGTGTTAGGAGCAGCTACTTAGCCTGGTACCAGCAGAAACCTGGCCAGGCTCCCAGGCT |
| | Sequence | CCTCATCTATGGTGCATCCAGCAGGGCCACTGGCATCCCAGACAGGTTCAGTGGCAGTGGGTCTGGGACA |
| | | GACTTCACTCTCACCATCAGCAGACTGGAGCCTGAAGATTTTGCAGTGTATTACTGTCAGCAGGCCTACA |
| | | GTTCCCCTTTGACTTTTGGCGGAGGGACCAAGGTTGAGATCAAA |
| 729 | BIIB-12-1327_VL | EIVMTQSPATQYVSPGERATLSCRASQSVSSNLAWYQQKPGQAPRLLIYGASTRATGIPARFSGSGSGTE |
| | Amino Acid | FTLTISSLQSEDFAVYYCQQYHNFPPTFGGGTKVEIK |
| | Sequence | |
| 730 | BIIB-12-1327_VL | GAAATAGTGATGACGCAGTCTCCAGCCACCCAGTATGTGTCTCCAGGGGAAAGAGCCACCCTCTCCTGCA |
| | Nucleic Acid | GGGCCAGTCAGAGTGTTAGCAGCAACTTAGCCTGGTACCAGCAGAAACCTGGCCAGGCTCCCAGGCTCCT |
| | Sequence737 | CATCTATGGTGCATCCACCAGGGCCACTGGTATCCCAGCCAGGTTCAGTGGCAGTGGGTCTGGGACAGAG |
| | | TTCACTCTCACCATCAGCAGCCTGCAGTCTGAAGATTTTGCAGTTTATTACTGTCAGCAGTACCACAATT |
| | | TCCCTCCTACTTTTGGCGGAGGGACCAAGGTTGAGATCAAA |
| 731 | BIIB-12-1328_VL | EIVMTQSPATLSVSPGERATLSCRASQSVSSNLAWYQQKPGQAPRLLIYGASTRATGIPARFSGSGSGTE |
| | Amino Acid | FTLTISSLQSEDFAVYYCQQPNSYPLTFGGGTKVEIK |
| | Sequence | |
| 732 | BIIB-12-1328_VL | GAAATAGTGATGACGCAGTCTCCAGCCACCCTGTCTGTGTCTCCAGGGGAAAGAGCCACCCTCTCCTGCA |
| | Nucleic Acid | GGGCCAGTCAGAGTGTTAGCAGCAACTTAGCCTGGTACCAGCAGAAACCTGGCCAGGCTCCCAGGCTCCT |
| | Sequence | CATCTATGGTGCATCCACCAGGGCCACTGGTATCCCAGCCAGGTTCAGTGGCAGTGGGTCTGGGACAGAG |
| | | TTCACTCTCACCATCAGCAGCCTGCAGTCTGAAGATTTTGCAGTTTATTACTGTCAGCAGCCCAATTCCT |
| | | ACCCTCTCACTTTTGGCGGAGGGACCAAGGTTGAGATCAAA |
| 733 | BIIB-12-1329_VL | EIVMTQSPATKSVSPGERATLSCRASQSVSSNLAWYQQKPGQAPRLLIYSASTRATGIPARFSGSGSGTE |
| | Amino Acid | FTLTISSLQSEDFAVYYCQQVFNWPPTFGGGTKVKIK |
| | Sequence | |
| 734 | BIIB-12-1329_VL | GAAATAGTGATGACGCAGTCTCCAGCCACCAAGTCTGTGTCTCCAGGGGAAAGAGCCACCCTCTCCTGCA |
| | Nucleic Acid | GGGCCAGTCAGAGTGTTAGCAGCAACTTAGCCTGGTACCAGCAGAAACCTGGCCAGGCTCCCAGGCTCCT |
| | Sequence | CATCTATAGCGCATCCACCAGGGCCACTGGTATCCCAGCCAGGTTCAGTGGCAGTGGGTCTGGGACAGAG |
| | | TTCACTCTCACCATCAGCAGCCTGCAGTCTGAAGATTTTGCAGTTTATTACTGTCAGCAGGTCTTCAATT |
| | | GGCCTCCTACTTTTGGCGGAGGGACCAAGGTTAAGATCAAA |
| 735 | BIIB-12-1330_VL | DIQMTQSPSSLSASVGDRVTITCRASQSISSYLNWYQQKPGKAPKLLIYAASSLQSGVPSRFSGSGSGTD |
| | Amino Acid | FTLTISSLQPEDFATYYCQQAYSVPITFGGGTKVEI |
| | Sequence | |
| 736 | BIIB-12-1330_VL | GACATCCAGATGACCCAGTCTCCATCCTCCCTGTCTGCATCTGTAGGAGACAGAGTCACCATCACTTGCC |
| | Nucleic Acid | GGGCAAGTCAGAGCATTAGCAGCTATTTAAATTGGTATCAGCAGAAACCAGGGAAAGCCCCTAAGCTCCT |
| | Sequence | GATCTATGCTGCATCCAGTTTGCAAAGTGGGGTCCCATCAAGGTTCAGTGGCAGTGGATCTGGGACAGAT |
| | | TTCACTCTCACCATCAGCAGTCTGCAACCTGAAGATTTTGCAACTTACTACTGTCAGCAAGCATACAGTG |
| | | TCCCTATCACTTTTGGCGGAGGGACCAAGGTTGAGATCAAA |
| 737 | BIIB-12-1331_VL | EIVLTQSPAKKSLSPGERATLSCRASQSVSSYLAWYQQKPGQAPRLLIYDASNRATGIPARFSGSGSGTD |
| | Amino Acid | FTLTISSLEPEDFAVYYCQQRVNLPITFGGGTKVVFK |
| | Sequence | |
| 738 | BIIB-12-1331_VL | GAAATTGTGTTGACACAGTCTCCAGCCAAAAAGTCTTTGTCTCCAGGGGAAAGAGCCACCCTCTCCTGCA |
| | Nucleic Acid | GGGCCAGTCAGAGTGTTAGCAGCTACTTAGCCTGGTACCAACAGAAACCTGGCCAGGCTCCCAGGCTCCT |
| | Sequence | CATCTATGATGCATCCAACAGGGCCACTGGCATCCCAGCCAGGTTCAGTGGCAGTGGGTCTGGGACAGAC |
| | | TTCACTCTCACCATCAGCAGCCTAGAGCCTGAAGATTTTGCAGTTTATTACTGTCAGCAGAGAGTCAATC |
| | | TCCCTATCACTTTTGGCGGAGGGACCAAGGTTGTGTTCAAA |
| 739 | BIIB-12-1332_VL | DIQMTQSPSSVSASVGDRVTITCRASQGISSWLAWYQQKPGKAPKLLIYAASSLQSGVPSRFSGSGSGTD |
| | Amino Acid | FTLTISSLQPEDFATYYCQQVNSFPLTFGGGTKVEFK |
| | Sequence | |
| 740 | BIIB-12-1332_VL | GACATCCAGATGACCCAGTCTCCATCTTCCGTATCAGCATCTGTAGGAGACAGAGTCACCATCACTTGTC |
| | Nucleic Acid | GGGCGAGTCAGGGTATTAGCAGCTGGTTAGCCTGGTATCAGCAGAAACCAGGGAAAGCCCCTAAGCTCCT |
| | Sequence | GATCTATGCTGCATCCAGTTTGCAAAGTGGGGTCCCATCAAGGTTCAGCGGCAGTGGATCTGGGACAGAT |
| | | TTCACTCTCACCATCAGCAGCCTGCAGCCTGAAGATTTTGCAACTTATTACTGTCAGCAGGTAAACAGTT |
| | | TCCCTCTCACTTTTGGCGGAGGGACCAAGGTTGAGTTCAAA |
| 741 | BIIB-12-1333_VL | EIVMTQSPATLSVSPGERATLSCRASQSVSSNLAWYQQKPGQAPRLLIYGASTRATGIPARFSGSGSGTE |
| | Amino Acid | FTLTISSLQSEDFAVYYCQQVNTWPTFGGGTKVEIK |
| | Sequence | |
| 742 | BIIB-12-1333_VL | GAAATAGTGATGACGCAGTCTCCAGCCACCCTGTCTGTGTCTCCAGGGGAAAGAGCCACCCTCTCCTGCA |
| | Nucleic Acid | GGGCCAGTCAGAGTGTTAGCAGCAACTTAGCCTGGTACCAGCAGAAACCTGGCCAGGCTCCCAGGCTCCT |
| | Sequence | CATCTATGGTGCATCCACCAGGGCCACTGGTATCCCAGCCAGGTTCAGTGGCAGTGGGTCTGGGACAGAG |
| | | TTCACTCTCACCATCAGCAGCCTGCAGTCTGAAGATTTTGCAGTTTATTACTGTCAGCAGGTCAATACCT |
| | | GGCCTACTTTTGGCGGAGGGACCAAGGTTGAGATCAAA |
| 743 | BIIB-12-1334_VL | DIVMTQSPLSLPVTPGEPASISCRSSQSLLHSNGYNYLDWYLQKPGQSPQLLIYLASNRASGVPDRFSGS |
| | Amino Acid | GSGTDFTLKISRVEAEDVGVYYCMQRIGTPWTFGGGTKVEIK |
| | Sequence | |
| 744 | BIIB-12-1334_VL | GATATTGTGATGACTCAGTCTCCACTCTCCCTGCCCGTCACCCCTGGAGAGCCGGCCTCCATCTCCTGCA |
| | Nucleic Acid | GGTCTAGTCAGAGCCTCCTGCATAGTAATGGATACAACTATTTGGATTGGTACCTGCAGAAGCCAGGGCA |
| | Sequence | GTCTCCACAGCTCCTGATCTATTTGGCTTCTAATCGGGCCTCCGGGGTCCCTGACAGGTTCAGTGGCAGT |
| | | GGATCAGGCACAGATTTTACACTGAAAATCAGCAGAGTGGAGGCTGAGGATGTTGGGGTTTATTACTGCA |
| | | TGCAGAGAATAGGCACTCCTTGGACTTTTGGCGGAGGGACCAAGGTTGAGATCAAA |

Class VI Antibodies - VL Sequences

| | | |
|---|---|---|
| 745 | BIIB-12-894_VL | DIQMTQSPSSLSASVGDRVTITCQASQDISNYLNWYQQKPGKAPKLLIYDASNLETGVPSRFSGSGSGTD |
| | Amino Acid | FTFTISSLQPEDIATYYCQQDDALPFTFGGGTKVEI |
| | Sequence | |
| 746 | BIIB-12-894_VL | GACATCCAGATGACCCAGTCTCCATCCTCCCTGTCTGCATCTGTAGGAGACAGAGTCACCATCACTTGCC |
| | Nucleic Acid | AGGCGAGTCAGGACATTAGCAACTATTTAAATTGGTATCAGCAGAAACCAGGGAAAGCCCCTAAGCTCCT |
| | Sequence | GATCTACGATGCATCCAATTTGGAAACAGGGGTCCCATCAAGGTTCAGTGGAAGTGGATCTGGGACAGAT |
| | | TTTACTTTCACCATCAGCAGCCTGCAGCCTGAAGATATTGCAACATATTACTGTCAGCAGGACGATGCCC |
| | | TCCCTTTCACTTTTGGCGGAGGGACCAAGGTTGAGATCAA |
| 747 | BIIB-12-925_VL | EIVLTQSPGTLSLSPGERATLSCRASQSVSSSYLAWYQQKPGQAPRLLIYGASSRATGIPDRFSGSGSGT |
| | Amino Acid | DFTLTISRLEPEDFAVYYCQQSGGSPLTFGGGTKVEIK |
| | Sequence | |
| 748 | BIIB-12-925_VL | GAAATTGTGTTGACGCAGTCTCCAGGCACCCTGTCTTTGTCTCCAGGGGAAAGAGCCACCCTCTCCTGCA |
| | Nucleic Acid | GGGCCAGTCAGAGTGTTAGCAGCAGCTACTTAGCCTGGTACCAGCAGAAACCTGGCCAGGCTCCCAGGCT |
| | Sequence | CCTCATCTATGGTGCATCCAGCAGGGCCACTGGCATCCCAGACAGGTTCAGTGGCAGTGGGTCTGGGACA |
| | | GACTTCACTCTCACCATCAGCAGACTGGAGCCTGAAGATTTTGCAGTGTATTACTGTCAGCAGTCCGGAG |
| | | GCTCCCCTCTCACTTTTGGCGGAGGGACCAAGGTTGAGATCAAA |
| 749 | BIIB-12-1320_VL | DIQMTQSPSSLSASVGDRVTITCRASQSISSYLNWYQQKPGKAPKLLIYAASSLQSGVPSRFSGSGSGTD |
| | Amino Acid | FTLTISSLQPEDFATYYCQQADDTPWTFGGGTKVEIK |
| | Sequence | |
| 750 | BIIB-12-1320_VL | GACATCCAGATGACCCAGTCTCCATCCTCCCTGTCTGCATCTGTAGGAGACAGAGTCACCATCACTTGCC |
| | Nucleic Acid | GGGCAAGTCAGAGCATTAGCAGCTATTTAAATTGGTATCAGCAGAAACCAGGGAAAGCCCCTAAGCTCCT |
| | Sequence | GATCTATGCTGCATCCAGTTTGCAAAGTGGGGTCCCATCAAGGTTCAGTGGCAGTGGATCTGGGACAGAT |
| | | TTCACTCTCACCATCAGCAGTCTGCAACCTGAAGATTTTGCAACTTACTACTGTCAGCAAGCAGACGACA |
| | | CTCCTTGGACTTTTGGCGGAGGGACCAAGGTTGAGATCAAA |
| 751 | BIIB-12-1321_VL | EIVMTQSPATLSLSPGERATLSCRASQSVSSYLAWYQQKPGQAPRLLIYDSSNRATGIPARFSGSGSGTD |
| | Amino Acid | FTLTISSLEPEDFAVYYCQQFTNLPYTFGGGTKVEIK |
| | Sequence | |
| 752 | BIIB-12-1321_VL | GAAATTGTGATGACACAGTCTCCAGCCACCCTGTCTTTGTCTCCAGGGGAAAGAGCCACCCTCTCCTGCA |
| | Nucleic Acid | GGGCCAGTCAGAGTGTTAGCAGCTACTTAGCCTGGTACCAACAGAAACCTGGCCAGGCTCCCAGGCTCCT |
| | Sequence | CATCTATGATTCATCCAACAGGGCCACTGGCATCCCAGCCAGGTTCAGTGGCAGTGGGTCTGGGACAGAC |
| | | TTCACTCTCACCATCAGCAGCCTAGAGCCTGAAGATTTTGCAGTTTATTACTGTCAGCAGTTCACCAATC |
| | | TCCCTTACACTTTTGGCGGAGGGACCAAGGTTGAGATCAAA |
| 756 | BIIB-FIX-147a- | YNSGKLEEFVQGNLERECMEEKCSFEEAREVFENTERTTEFWKQYVDGDQCESNPCLNGGSCKDDINSYE |
| | LC Amino Acid | CWCPFGFEGKNCELDVTCNIKNGRCEQFCKNSADNKWCSCTEGYRLAENQKSCEPAVPFPCGRVSVSQTS |
| | Sequence | KLTR |
| | (Light chain | |
| | of activated | |
| | Factor IX) | |
| 757 | BIIB-FIX-147a- | TATAATTCAGGTAAATTGGAAGAGTTTGTTCAAGGGAATCTAGAGAGAGAATGTATGGAAGAAAAGTGTA |
| | LC Nucleic Acid | GTTTTGAAGAAGCACGAGAAGTTTTTGAAAACACTGAAAGAACAACTGAATTTTGGAAGCAGTATGTTGA |
| | Sequence | TGGAGATCAGTGTGAGTCCAATCCATGTTTAAATGGCGGCAGTTGCAAGGATGACATTAATTCCTATGAA |
| | | TGTTGGTGTCCCTTTGGATTTGAAGGAAAGAACTGTGAATTAGATGTAACATGTAACATTAAGAATGGCA |
| | | GATGCGAGCAGTTTTGTAAAAATAGTGCTGATAACAAGGTGGTTTGCTCCTGTACTGAGGGATATCGACT |
| | | TGCAGAAAACCAGAAGTCCTGTGAACCAGCAGTGCCATTTCCATGTGGAAGAGTTTCTGTTTCACAAACT |
| | | TCTAAGCTCACCCGT |
| 758 | BIIB-FIX-147a- HC Amino Acid Sequence (Heavy chain | [chemical structure] |
| | of activated | |
| | FIX) C-terminal | |
| | (G₃S)₂ linker | |
| | (underlined)and | |
| | BioTag (double | |
| | underlined) | |
| 759 | BIIB-FIX-147a- HC Nucleic Acid Sequence (Heavy chain of activated FIX) C-terminal(G₃S)₂ linker (under- lined)and BioTag (double underlined) | [chemical structure] |
| 760 | BIIB-FIX-148 Amino Acid Sequence Non- activatable Factor IX construct comprising Arg | [chemical structure] |
| | to Ala mutation | |
| | (boxed) to | |
| | prevent acti- | |
| | vation of FIX | |
| | and C-terminal | |
| | (G₃S)₂ linker | |
| | (underlined) | |
| | and BioTag | |
| | (double | |
| | underlined) | |
| 761 | BIIB-FIX-148 Nucleic Acid Sequence Non- activatable Factor X construct comprising Arg to Ala mutation(boxed) to prevent activation of FX, and C- terminal (G₃S)₂ linker (under- lined) and BioTag (double underlined) | [chemical structure] |
| 762 | BIIB-FX-015 Amino Acid Sequence | [chemical structure] |
| 763 | BIIB-FX-015 Nucleic Acid Sequence Non- activatable Factor X construct comprising Arg to Ala mutation (boxed) to prevent acti- vation of FX, and C-terminal (G₃S)₂ linker (underlined) and BioTag (double underlined) | [chemical structure] |
| 764 | pre-pro-FIX | MQRVNMIMAESPGLITICLLGYLLSAECTVFLDHENANKILNRPKRYNSGKLEEFVQGNLERECMEEKCS |
| | zymogen | FEEAREVFENTERTTEFWKQYVDGDQCESNPCLNGGSCKDDINSYECWCPFGFEGKNCELDVTCNIKNGR |
| | | CEQFCKNSADNKVVCSCTEGYRLAENQKSCEPAVPFPCGRVSVSQTSKLTRAETVFPDVDYVNSTEAETI |
| | | LDNITQSTQSFNDFTRVVGGEDAKPGQFPWQVVLNGKVDAFCGGSIVNEKWIVTAAHCVETGVKITWAGE |
| | | HNIEETEHTEQKRNVIRIIPHHNYNAAINKYNHDIALLELDEPLVLNSYVTPICIADKEYTNIFLKFGSG |
| | | YVSGWGRVFHKGRSALVLQYLRVPLVDRATCLRSTKFTIYNNMFCAGFHEGGRDSCQGDSGGPHVTEVEG |
| | | TSFLTGIISWGEECAMKGKYGIYTKVSRYVNWIKEKTKLT |

TABLE 5
SEQ ID NO Designation for CDRs.

| | | | | | | |
|---|---|---|---|---|---|---|
| Antibody | VH-CDR1 | VH-CDR2 | VH-CDR3 | VL-CDR1 | VL-CDR2 | VL-CDR3 |

Class I antibodies

| | | | | | | |
|---|---|---|---|---|---|---|
| BIIB-9-605 | 800 | 845 | 890 | 935 | 980 | 1025 |
| BIIB-9-475 | 801 | 846 | 891 | 936 | 981 | 1026 |
| BIIB-9-477 | 802 | 847 | 892 | 937 | 982 | 1027 |
| BIIB-9-479 | 803 | 848 | 893 | 938 | 983 | 1028 |
| BIIB-9-480 | 804 | 849 | 894 | 939 | 984 | 1029 |
| BIIB-9-558 | 805 | 850 | 895 | 940 | 985 | 1030 |
| BIIB-9-414 | 806 | 851 | 896 | 941 | 986 | 1031 |
| BIIB-9-415 | 807 | 852 | 897 | 942 | 987 | 1032 |
| BIIB-9-425 | 808 | 853 | 898 | 943 | 988 | 1033 |
| BIIB-9-440 | 809 | 854 | 899 | 944 | 989 | 1034 |
| BIIB-9-452 | 810 | 855 | 900 | 945 | 990 | 1035 |
| BIIB-9-460 | 811 | 856 | 901 | 946 | 991 | 1036 |
| BIIB-9-461 | 812 | 857 | 902 | 947 | 992 | 1037 |
| BIIB-9-465 | 813 | 858 | 903 | 948 | 993 | 1038 |
| BIIB-9-564 | 814 | 859 | 904 | 949 | 994 | 1039 |
| BIIB-9-484 | 815 | 860 | 905 | 950 | 995 | 1040 |
| BIIB-9-469 | 816 | 861 | 906 | 951 | 996 | 1041 |
| BIIB-9-566 | 817 | 862 | 907 | 952 | 997 | 1042 |
| BIIB-9-567 | 818 | 863 | 908 | 953 | 998 | 1043 |
| BIIB-9-569 | 819 | 864 | 909 | 954 | 999 | 1044 |
| BIIB-9-588 | 820 | 865 | 910 | 955 | 1000 | 1045 |
| BIIB-9-611 | 821 | 866 | 911 | 956 | 1001 | 1046 |
| BIIB-9-619 | 822 | 867 | 912 | 957 | 1002 | 1047 |
| BIIB-9-626 | 823 | 868 | 913 | 958 | 1003 | 1048 |
| BIIB-9-883 | 824 | 869 | 914 | 959 | 1004 | 1049 |
| BIIB-9-419 | 825 | 870 | 915 | 960 | 1005 | 1050 |
| BIIB-9-451 | 826 | 871 | 916 | 961 | 1006 | 1051 |
| BIIB-9-473 | 827 | 872 | 917 | 962 | 1007 | 1052 |
| BIIB-9-565 | 828 | 873 | 918 | 963 | 1008 | 1053 |
| BIIB-9-573 | 829 | 874 | 919 | 964 | 1009 | 1054 |
| BIIB-9-579 | 830 | 875 | 920 | 965 | 1010 | 1055 |
| BIIB-9-581 | 831 | 876 | 921 | 966 | 1011 | 1056 |
| BIIB-9-582 | 832 | 877 | 922 | 967 | 1012 | 1057 |
| BIIB-9-585 | 833 | 878 | 923 | 968 | 1013 | 1058 |
| BIIB-9-587 | 834 | 879 | 924 | 969 | 1014 | 1059 |
| BIIB-9-590 | 835 | 880 | 925 | 970 | 1015 | 1060 |
| BIIB-9-592 | 836 | 881 | 926 | 971 | 1016 | 1061 |
| BIIB-9-606 | 837 | 882 | 927 | 972 | 1017 | 1062 |
| BIIB-9-608 | 838 | 883 | 928 | 973 | 1018 | 1063 |
| BIIB-9-616 | 839 | 884 | 929 | 974 | 1019 | 1064 |
| BIIB-9-621 | 840 | 885 | 930 | 975 | 1020 | 1065 |
| BIIB-9-622 | 841 | 886 | 931 | 976 | 1021 | 1066 |
| BIIB-9-627 | 842 | 887 | 932 | 977 | 1022 | 1067 |
| BIIB-9-1335 | 843 | 888 | 933 | 978 | 1023 | 1068 |
| BIIB-9-1336 | 844 | 889 | 934 | 979 | 1024 | 1069 |

Class II Antibodies

| | | | | | | |
|---|---|---|---|---|---|---|
| BIIB-9-408 | 1070 | 1074 | 1078 | 1082 | 1086 | 1090 |
| BIIB-9-416 | 1071 | 1075 | 1079 | 1083 | 1087 | 1091 |
| BIIB-9-629 | 1072 | 1076 | 1080 | 1084 | 1088 | 1092 |
| BIIB-9-885 | 1073 | 1077 | 1081 | 1085 | 1089 | 1093 |

Class III Antibodies

| | | | | | | |
|---|---|---|---|---|---|---|
| BIIB-9-607 | 1094 | 1136 | 1178 | 1220 | 1262 | 1304 |
| BIIB-9-471 | 1095 | 1137 | 1179 | 1221 | 1263 | 1305 |
| BIIB-9-472 | 1096 | 1138 | 1180 | 1222 | 1264 | 1306 |
| BIIB-9-439 | 1097 | 1139 | 1181 | 1223 | 1265 | 1307 |
| BIIB-9-446 | 1098 | 1140 | 1182 | 1224 | 1266 | 1308 |
| BIIB-9-568 | 1099 | 1141 | 1183 | 1225 | 1267 | 1309 |
| BIIB-9-615 | 1100 | 1142 | 1184 | 1226 | 1268 | 1310 |
| BIIB-9-628 | 1101 | 1143 | 1185 | 1227 | 1269 | 1311 |
| BIIB-9-882 | 1102 | 1144 | 1186 | 1228 | 1270 | 1312 |
| BIIB-9-884 | 1103 | 1145 | 1187 | 1229 | 1271 | 1313 |
| BIIB-9-886 | 1104 | 1146 | 1188 | 1230 | 1272 | 1314 |
| BIIB-9-887 | 1105 | 1147 | 1189 | 1231 | 1273 | 1315 |
| BIIB-9-888 | 1106 | 1148 | 1190 | 1232 | 1274 | 1316 |
| BIIB-9-889 | 1107 | 1149 | 1191 | 1233 | 1275 | 1317 |
| BIIB-9-433 | 1108 | 1150 | 1192 | 1234 | 1276 | 1318 |
| BIIB-9-445 | 1109 | 1151 | 1193 | 1235 | 1277 | 1319 |
| BIIB-9-470 | 1110 | 1152 | 1194 | 1236 | 1278 | 1320 |
| BIIB-9-625 | 1111 | 1153 | 1195 | 1237 | 1279 | 1321 |
| BIIB-9-1264 | 1112 | 1154 | 1196 | 1238 | 1280 | 1322 |
| BIIB-9-1265 | 1113 | 1155 | 1197 | 1239 | 1281 | 1323 |
| BIIB-9-1266 | 1114 | 1156 | 1198 | 1240 | 1282 | 1324 |
| BIIB-9-1267 | 1115 | 1157 | 1199 | 1241 | 1283 | 1325 |
| BIIB-9-1268 | 1116 | 1158 | 1200 | 1242 | 1284 | 1326 |
| BIIB-9-1269 | 1117 | 1159 | 1201 | 1243 | 1285 | 1327 |
| BIIB-9-1270 | 1118 | 1160 | 1202 | 1244 | 1286 | 1328 |
| BIIB-9-1271 | 1119 | 1161 | 1203 | 1245 | 1287 | 1329 |
| BIIB-9-1272 | 1120 | 1162 | 1204 | 1246 | 1288 | 1330 |
| BIIB-9-1273 | 1121 | 1163 | 1205 | 1247 | 1289 | 1331 |
| BIIB-9-1274 | 1122 | 1164 | 1206 | 1248 | 1290 | 1332 |
| BIIB-9-1275 | 1123 | 1165 | 1207 | 1249 | 1291 | 1333 |
| BIIB-9-1276 | 1124 | 1166 | 1208 | 1250 | 1292 | 1334 |
| BIIB-9-1277 | 1125 | 1167 | 1209 | 1251 | 1293 | 1335 |
| BIIB-9-1278 | 1126 | 1168 | 1210 | 1252 | 1294 | 1336 |
| BIIB-9-1279 | 1127 | 1169 | 1211 | 1253 | 1295 | 1337 |
| BIIB-9-1280 | 1128 | 1170 | 1212 | 1254 | 1296 | 1338 |
| BIIB-9-1281 | 1129 | 1171 | 1213 | 1255 | 1297 | 1339 |
| BIIB-9-1282 | 1130 | 1172 | 1214 | 1256 | 1298 | 1340 |
| BIIB-9-1283 | 1131 | 1173 | 1215 | 1257 | 1299 | 1341 |
| BIIB-9-1284 | 1132 | 1174 | 1216 | 1258 | 1300 | 1342 |
| BIIB-9-1285 | 1133 | 1175 | 1217 | 1259 | 1301 | 1343 |
| BIIB-9-1286 | 1134 | 1176 | 1218 | 1260 | 1302 | 1344 |
| BIIB-9-1287 | 1135 | 1177 | 1219 | 1261 | 1303 | 1345 |

Class IV Antibodies

| | | | | | | |
|---|---|---|---|---|---|---|
| BIIB-9-397 | 1346 | 1350 | 1354 | 1358 | 1362 | 1366 |
| BIIB-9-578 | 1347 | 1351 | 1355 | 1359 | 1363 | 1367 |
| BIIB-9-631 | 1348 | 1352 | 1356 | 1360 | 1364 | 1368 |
| BIIB-9-612 | 1349 | 1353 | 1357 | 1361 | 1365 | 1369 |

Class V Antibodies

| | | | | | | |
|---|---|---|---|---|---|---|
| BIIB-12-891 | 1370 | 1460 | 1550 | 1640 | 1730 | 1820 |
| BIIB-12-892 | 1371 | 1461 | 1551 | 1641 | 1731 | 1821 |
| BIIB-12-893 | 1372 | 1462 | 1552 | 1642 | 1732 | 1822 |
| BIIB-12-895 | 1373 | 1463 | 1553 | 1643 | 1733 | 1823 |
| BIIB-12-896 | 1374 | 1464 | 1554 | 1644 | 1734 | 1824 |
| BIIB-12-897 | 1375 | 1465 | 1555 | 1645 | 1735 | 1825 |
| BIIB-12-898 | 1376 | 1466 | 1556 | 1646 | 1736 | 1826 |
| BIIB-12-899 | 1377 | 1467 | 1557 | 1647 | 1737 | 1827 |
| BIIB-12-900 | 1378 | 1468 | 1558 | 1648 | 1738 | 1828 |
| BIIB-12-901 | 1379 | 1469 | 1559 | 1649 | 1739 | 1829 |
| BIIB-12-902 | 1380 | 1470 | 1560 | 1650 | 1740 | 1830 |
| BIIB-12-903 | 1381 | 1471 | 1561 | 1651 | 1741 | 1831 |
| BIIB-12-904 | 1382 | 1472 | 1562 | 1652 | 1742 | 1832 |
| BIIB-12-905 | 1383 | 1473 | 1563 | 1653 | 1743 | 1833 |
| BIIB-12-906 | 1384 | 1474 | 1564 | 1654 | 1744 | 1834 |
| BIIB-12-907 | 1385 | 1475 | 1565 | 1655 | 1745 | 1835 |
| BIIB-12-908 | 1386 | 1476 | 1566 | 1656 | 1746 | 1836 |
| BIIB-12-909 | 1387 | 1477 | 1567 | 1657 | 1747 | 1837 |
| BIIB-12-910 | 1388 | 1478 | 1568 | 1658 | 1748 | 1838 |
| BIIB-12-911 | 1389 | 1479 | 1569 | 1659 | 1749 | 1839 |
| BIIB-12-912 | 1390 | 1480 | 1570 | 1660 | 1750 | 1840 |
| BIIB-12-913 | 1391 | 1481 | 1571 | 1661 | 1751 | 1841 |
| BIIB-12-914 | 1392 | 1482 | 1572 | 1662 | 1752 | 1842 |
| BIIB-12-915 | 1393 | 1483 | 1573 | 1663 | 1753 | 1843 |
| BIIB-12-916 | 1394 | 1484 | 1574 | 1664 | 1754 | 1844 |
| BIIB-12-917 | 1395 | 1485 | 1575 | 1665 | 1755 | 1845 |
| BIIB-12-918 | 1396 | 1486 | 1576 | 1666 | 1756 | 1846 |
| BIIB-12-919 | 1397 | 1487 | 1577 | 1667 | 1757 | 1847 |
| BIIB-12-920 | 1398 | 1488 | 1578 | 1668 | 1758 | 1848 |
| BIIB-12-921 | 1399 | 1489 | 1579 | 1669 | 1759 | 1849 |
| BIIB-12-922 | 1400 | 1490 | 1580 | 1670 | 1760 | 1850 |
| BIIB-12-923 | 1401 | 1491 | 1581 | 1671 | 1761 | 1851 |
| BIIB-12-924 | 1402 | 1492 | 1582 | 1672 | 1762 | 1852 |
| BIIB-12-926 | 1403 | 1493 | 1583 | 1673 | 1763 | 1853 |
| BIIB-12-927 | 1404 | 1494 | 1584 | 1674 | 1764 | 1854 |
| BIIB-12-928 | 1405 | 1495 | 1585 | 1675 | 1765 | 1855 |
| BIIB-12-929 | 1406 | 1496 | 1586 | 1676 | 1766 | 1856 |
| BIIB-12-930 | 1407 | 1497 | 1587 | 1677 | 1767 | 1857 |
| BIIB-12-931 | 1408 | 1498 | 1588 | 1678 | 1768 | 1858 |
| BIIB-12-932 | 1409 | 1499 | 1589 | 1679 | 1769 | 1859 |
| BIIB-12-933 | 1410 | 1500 | 1590 | 1680 | 1770 | 1860 |
| BIIB-12-934 | 1411 | 1501 | 1591 | 1681 | 1771 | 1861 |
| BIIB-12-935 | 1412 | 1502 | 1592 | 1682 | 1772 | 1862 |
| BIIB-12-936 | 1413 | 1503 | 1593 | 1683 | 1773 | 1863 |
| BIIB-12-937 | 1414 | 1504 | 1594 | 1684 | 1774 | 1864 |
| BIIB-12-1288 | 1415 | 1505 | 1595 | 1685 | 1775 | 1865 |
| BIIB-12-1289 | 1416 | 1506 | 1596 | 1686 | 1776 | 1866 |
| BIIB-12-1290 | 1417 | 1507 | 1597 | 1687 | 1777 | 1867 |
| BIIB-12-1291 | 1418 | 1508 | 1598 | 1688 | 1778 | 1868 |
| BIIB-12-1292 | 1419 | 1509 | 1599 | 1689 | 1779 | 1869 |
| BIIB-12-1293 | 1420 | 1510 | 1600 | 1690 | 1780 | 1870 |
| BIIB-12-1294 | 1421 | 1511 | 1601 | 1691 | 1781 | 1871 |
| BIIB-12-1295 | 1422 | 1512 | 1602 | 1692 | 1782 | 1872 |
| BIIB-12-1296 | 1423 | 1513 | 1603 | 1693 | 1783 | 1873 |
| BIIB-12-1297 | 1424 | 1514 | 1604 | 1694 | 1784 | 1874 |
| BIIB-12-1298 | 1425 | 1515 | 1605 | 1695 | 1785 | 1875 |
| BIIB-12-1299 | 1426 | 1516 | 1606 | 1696 | 1786 | 1876 |
| BIIB-12-1300 | 1427 | 1517 | 1607 | 1697 | 1787 | 1877 |
| BIIB-12-1301 | 1428 | 1518 | 1608 | 1698 | 1788 | 1878 |
| BIIB-12-1302 | 1429 | 1519 | 1609 | 1699 | 1789 | 1879 |
| BIIB-12-1303 | 1430 | 1520 | 1610 | 1700 | 1790 | 1880 |
| BIIB-12-1304 | 1431 | 1521 | 1611 | 1701 | 1791 | 1881 |
| BIIB-12-1305 | 1432 | 1522 | 1612 | 1702 | 1792 | 1882 |
| BIIB-12-1306 | 1433 | 1523 | 1613 | 1703 | 1793 | 1883 |
| BIIB-12-1307 | 1434 | 1524 | 1614 | 1704 | 1794 | 1884 |
| BIIB-12-1308 | 1435 | 1525 | 1615 | 1705 | 1795 | 1885 |
| BIIB-12-1309 | 1436 | 1526 | 1616 | 1706 | 1796 | 1886 |
| BIIB-12-1310 | 1437 | 1527 | 1617 | 1707 | 1797 | 1887 |
| BIIB-12-1311 | 1438 | 1528 | 1618 | 1708 | 1798 | 1888 |
| BIIB-12-1312 | 1439 | 1529 | 1619 | 1709 | 1799 | 1889 |
| BIIB-12-1313 | 1440 | 1530 | 1620 | 1710 | 1800 | 1890 |
| BIIB-12-1314 | 1441 | 1531 | 1621 | 1711 | 1801 | 1891 |
| BIIB-12-1315 | 1442 | 1532 | 1622 | 1712 | 1802 | 1892 |
| BIIB-12-1316 | 1443 | 1533 | 1623 | 1713 | 1803 | 1893 |
| BIIB-12-1317 | 1444 | 1534 | 1624 | 1714 | 1804 | 1894 |
| BIIB-12-1318 | 1445 | 1535 | 1625 | 1715 | 1805 | 1895 |
| BIIB-12-1319 | 1446 | 1536 | 1626 | 1716 | 1806 | 1896 |
| BIIB-12-1322 | 1447 | 1537 | 1627 | 1717 | 1807 | 1897 |
| BIIB-12-1323 | 1448 | 1538 | 1628 | 1718 | 1808 | 1898 |
| BIIB-12-1324 | 1449 | 1539 | 1629 | 1719 | 1809 | 1899 |
| BIIB-12-1325 | 1450 | 1540 | 1630 | 1720 | 1810 | 1900 |
| BIIB-12-1326 | 1451 | 1541 | 1631 | 1721 | 1811 | 1901 |
| BIIB-12-1327 | 1452 | 1542 | 1632 | 1722 | 1812 | 1902 |
| BIIB-12-1328 | 1453 | 1543 | 1633 | 1723 | 1813 | 1903 |
| BIIB-12-1329 | 1454 | 1544 | 1634 | 1724 | 1814 | 1904 |
| BIIB-12-1330 | 1455 | 1545 | 1635 | 1725 | 1815 | 1905 |
| BIIB-12-1331 | 1456 | 1546 | 1636 | 1726 | 1816 | 1906 |
| BIIB-12-1332 | 1457 | 1547 | 1637 | 1727 | 1817 | 1907 |
| BIIB-12-1333 | 1458 | 1548 | 1638 | 1728 | 1818 | 1908 |
| BIIB-12-1334 | 1459 | 1549 | 1639 | 1729 | 1819 | 1909 |

Class VI Antibodies

| BIIB-12-894 | 1910 | 1914 | 1918 | 1922 | | |
|---|---|---|---|---|---|---|
| BIIB-12-925 | 1911 | 1915 | 1919 | 1923 | 1927 | 1931 |
| BIIB-12-1320 | 1912 | 1916 | 1920 | 1924 | 1928 | 1932 |
| BIIB-12-1321 | 1913 | 1917 | 1921 | 1925 | 1929 | 1933 |

TABLE 6
Sequences of Example 14 daughter antibodies

| | | |
|---|---|---|
| | Description | |
| | (Antibody, | |
| SEQ | domain, | |
| ID | sequence | |
| NO | type) | Sequence |

Parent Antibody: BIIB-9-484

| | | |
|---|---|---|
| 1934 | BIIB-9-3595 | GAGGTGCAGCTGGTGGAGTCTGGGGGAGGCCTGGTCAAGCCTGGGGGGTCCCTGAGACTCTCCTGTGCAG |
| | VH (na) | CCTCTGGATTCACCTTCAGTAGCTATAGCATGAACTGGGTCCGCCAGGCTCCAGGGAAGGGGCTGGAGTG |
| | | GGTCTCATCCATTAGTAGTAGTAGTAGTTACATATACTACGCAGACTCAGTGAAAGGCCGATTCACCATC |
| | | TCCAGAGACAACGCCAAGAACTCACTGTATCTGCAAATGAACAGCCTGAGAGCCGAGGACACGGCGGTGT |
| | | ACTACTGCGCCAGAGATTTGGGTGGATACGCAGGGTACTACGGCATGGATGTATGGGGGCAAGGGACCAC |
| | | GGTCACCGTCTCCTCA |
| 1935 | BIIB-9-3595 | EVQLVESGGGLVKPGGSLRLSCAASGFTFSSYSMNWVRQAPGKGLEWVSSISSSSSYIYYADSVKGRFTI |
| | VH (aa) | SRDNAKNSLYLQMNSLRAEDTAVYYCARDLGGYAGYYGMDVWGQGTTVTVSS |
| 1936 | BIIB-9-3595 | GACATCCAGATGACCCAGTCTCCATCCTCCCTGTCTGCATCTGTAGGAGACAGAGTCACCATCACTTGCC |
| | VL (na) | AGGCGAGTCAGGACATTGCCAACTATTTAAATTGGTATCAGCAGAAACCAGGGAAAGCCCCTAAGCTCCT |
| | | GATCTACGATGCATCCAATTTGGAAACAGGGGTCCCATCAAGGTTCAGTGGAAGTGGATCTGGGACAGAT |
| | | TTTACTTTCACCATCAGCAGCCTGCAGCCTGAAGATATTGCAACATATTACTGTCAGCAGTACGCCAACT |
| | | TCCCTTACACTTTTGGCGGAGGGACCAAGGTTGAGATCAAA |
| 1937 | BIIB-9-3595 | DIQMTQSPSSLSASVGDRVTITCQASQDIANYLNWYQQKPGKAPKLLIYDASNLETGVPSRFSGSGSGTD |
| | VL (aa) | FTFTISSLQPEDIATYYCQQYANFPYTFGGGTKVEIK |
| 1938 | BIIB-9-3601 | GAGGTGCAGCTGGTGGAGTCTGGGGGAGGCCTGGTCAAGCCTGGGGGGTCCCTGAGACTCTCCTGTGCAG |
| | VH (na) | CCTCTGGATTCACCTTCAGTAGCTTCAGCATGAACTGGGTCCGCCAGGCTCCAGGGAAGGGGCTGGAGTG |
| | | GGTCTCATCCATTAGTAGTGCTGGGAGTTACATATACTACGCAGACTCAGTGAAGGGCCGATTCACCATC |
| | | TCCAGAGACAACGCCAAGAACTCACTGTATCTGCAAATGAACAGCCTGAGAGCCGAGGACACGGCGGTGT |
| | | ACTACTGCGCCAGAGATGTAGGAGGATACGCAGGGTACTACGGCATGGATGTATGGGGCCAGGGAACAAC |
| | | TGTCACCGTCTCCTCA |
| 1939 | BIIB-9-3601 | EVQLVESGGGLVKPGGSLRLSCAASGFTFSSFSMNWVRQAPGKGLEWVSSISSAGSYIYYADSVKGRFTI |
| | VH (aa) | SRDNAKNSLYLQMNSLRAEDTAVYYCARDVGGYAGYYGMDVWGQGTTVTVSS |
| 1940 | BIIB-9-3601 | GACATCCAGATGACCCAGTCTCCATCCTCCCTGTCTGCATCTGTAGGAGACAGAGTCACCATCACTTGCC |
| | VL (na) | AGGCGAGTCAGGACATTGCCAACTATTTAAATTGGTATCAGCAGAAACCAGGGAAAGCCCCTAAGCTCCT |
| | | GATCTACGATGCATCCAATTTGGAAACAGGGGTCCCATCAAGGTTCAGTGGAAGTGGATCTGGGACAGAT |
| | | TTTACTTTCACCATCAGCAGCCTGCAGCCTGAAGATATTGCAACATATTACTGTCAGCAGTACGCCAACT |
| | | TCCCTTACACTTTTGGCGGAGGGACCAAGGTTGAGATCAAA |
| 1941 | BIIB-9-3601 | DIQMTQSPSSLSASVGDRVTITCQASQDIANYLNWYQQKPGKAPKLLIYDASNLETGVPSRFSGSGSGTD |
| | VL faa) | FTFTISSLQPEDIATYYCQQYANFPYTFGGGTKVEIK |
| 1942 | BIIB-9-3604 | GAGGTGCAGCTGGTGGAGTCTGGGGGAGGCCTGGTCAAGCCTGGGGGGTCCCTGAGACTCTCCTGTGCAG |
| | VH (na) | CCTCTGGATTCACCTTCAGTAGCTATGATATGGTGTGGGTCCGCCAGGCTCCAGGGAAGGGGCTGGAGTG |
| | | GGTCTCATCCATTAGTAGTGGGGATAGTTACATATACTACGCAGACTCAGTGAAGGGCCGATTCACCATC |
| | | TCCAGAGACAACGCCAAGAACTCACTGTATCTGCAAATGAACAGCCTGAGAGCCGAGGACACGGCGGTGT |
| | | ACTACTGCGCCAGAGATGTAGGAGGATACGCAGGGTACTACGGCATGGATGTATGGGGCCAGGGAACAAC |
| | | TGTCACCGTCTCCTCA |
| 1943 | BIIB-9-3604 | EVQLVESGGGLVKPGGSLRLSCAASGFTFSSYDMVWVRQAPGKGLEWVSSISSGDSYIYYADSVKGRFTI |
| | VH (aa) | SRDNAKNSLYLQMNSLRAEDTAVYYCARDVGGYAGYYGMDVWGQGTTVTVSS |
| 1944 | BIIB-9-3604 | GACATCCAGATGACCCAGTCTCCATCCTCCCTGTCTGCATCTGTAGGAGACAGAGTCACCATCACTTGCC |
| | VL (na) | AGGCGAGTCAGGACATTGCCAACTATTTAAATTGGTATCAGCAGAAACCAGGGAAAGCCCCTAAGCTCCT |
| | | GATCTACGATGCATCCAATTTGGAAACAGGGGTCCCATCAAGGTTCAGTGGAAGTGGATCTGGGACAGAT |
| | | TTTACTTTCACCATCAGCAGCCTGCAGCCTGAAGATATTGCAACATATTACTGTCAGCAGTACGCCAACT |
| | | TCCCTTACACTTTTGGCGGAGGGACCAAGGTTGAGATCAAA |
| 1945 | BIIB-9-3604 | DIQMTQSPSSLSASVGDRVTITCQASQDIANYLNWYQQKPGKAPKLLIYDASNLETGVPSRFSGSGSGTD |
| | VL (aa) | FTFTISSLQPEDIATYYCQQYANFPYTFGGGTKVEIK |
| 1946 | BIIB-9-3617 | GAGGTGCAGCTGGTGGAGTCTGGGGGAGGCCTGGTCAAGCCTGGGGGGTCCCTGAGACTCTCCTGTGCAG |
| | VH (na) | CCTCTGGATTCACCTTCAGTAGCTATTCTATGACTTGGGTCCGCCAGGCTCCAGGGAAGGGGCTGGAGTG |
| | | GGTCTCATCCATTAGTAGTAGTGGTACGTACATATACTACGCAGACTCAGTGAAGGGCCGATTCACCATC |
| | | TCCAGAGACAACGCCAAGAACTCACTGTATCTGCAAATGAACAGCCTGAGAGCCGAGGACACGGCGGTGT |
| | | ACTACTGCGCCAGAGATGTAGGAGGATACGCAGGGTACTACGGCATGGATGTATGGGGCCAGGGAACAAC |
| | | TGTCACCGTCTCCTCA |
| 1947 | BIIB-9-3617 | EVQLVESGGGLVKPGGSLRLSCAASGFTFSSYSMTWVRQAPGKGLEWVSSISSSGTYIYYADSVKGRFTI |
| | VH (aa) | SRDNAKNSLYLQMNSLRAEDTAVYYCARDVGGYAGYYGMDVWGQGTTVTVSS |
| 1948 | BIIB-9-3617 | GACATCCAGATGACCCAGTCTCCATCCTCCCTGTCTGCATCTGTAGGAGACAGAGTCACCATCACTTGCC |
| | VL (na) | AGGCGAGTCAGGACATTGCCAACTATTTAAATTGGTATCAGCAGAAACCAGGGAAAGCCCCTAAGCTCCT |
| | | GATCTACGATGCATCCAATTTGGAAACAGGGGTCCCATCAAGGTTCAGTGGAAGTGGATCTGGGACAGAT |
| | | TTTACTTTCACCATCAGCAGCCTGCAGCCTGAAGATATTGCAACATATTACTGTCAGCAGTACGCCAACT |
| | | TCCCTTACACTTTTGGCGGAGGGACCAAGGTTGAGATCAAA |
| 1949 | BIIB-9-3617 | DIQMTQSPSSLSASVGDRVTITCQASQDIANYLNWYQQKPGKAPKLLIYDASNLETGVPSRFSGSGSGTD |
| | VL (aa) | FTFTISSLQPEDIATYYCQQYANFPYTFGGGTKVEIK |
| 1950 | BIIB-9-3618 | GAGGTGCAGCTGGTGGAGTCTGGGGGAGGCCTGGTCAAGCCTGGGGGGTCCATGAGACTCTCCTGTGCAG |
| | VH (na) | CCTCTGGATTCACCTTCAGTAGCTATGAGATGGTTTGGGTCCGCCAGGCTCCAGGGAAGGGGCTGGAGTG |
| | | GGTCTCATATATTAGTAGTGGTAGTAGTTACATATACTACGCAGACTCAGTGAAGGGCCGATTCACCATC |
| | | TCCAGAGACAACGCCAAGAACTCACTGTATCTGCAAATGAACAGCCTGAGAGCCGAGGACACGGCGGTGT |
| | | ACTACTGCGCCAGAGATGTAGGAGGATACGCAGGGTACTACGGCATGGATGTATGGGGCCAGGGAACAAC |
| | | TGTCACCGTCTCCTCA |
| 1951 | BIIB-9-3618 | EVQLVESGGGLVKPGGSMRLSCAASGFTFSSYEMVWVRQAPGKGLEWVSYISSGSSYIYYADSVKGRFTI |
| | VH (aa) | SRDNAKNSLYLQMNSLRAEDTAVYYCARDVGGYAGYYGMDVWGQGTTVTVSS |
| 1952 | BIIB-9-3618 | GACATCCAGATGACCCAGTCTCCATCCTCCCTGTCTGCATCTGTAGGAGACAGAGTCACCATCACTTGCC |
| | VL (na) | AGGCGAGTCAGGACATTGCCAACTATTTAAATTGGTATCAGCAGAAACCAGGGAAAGCCCCTAAGCTCCT |
| | | GATCTACGATGCATCCAATTTGGAAACAGGGGTCCCATCAAGGTTCAGTGGAAGTGGATCTGGGACAGAT |
| | | TTTACTTTCACCATCAGCAGCCTGCAGCCTGAAGATATTGCAACATATTACTGTCAGCAGTACGCCAACT |
| | | TCCCTTACACTTTTGGCGGAGGGACCAAGGTTGAGATCAAA |
| 1953 | BIIB-9-3618 | DIQMTQSPSSLSASVGDRVTITCQASQDIANYLNWYQQKPGKAPKLLIYDASNLETGVPSRFSGSGSGTD |
| | VL (aa) | FTFTISSLQPEDIATYYCQQYANFPYTFGGGTKVEIK |
| 1954 | BIIB-9-3621 | GAGGTGCAGCTGGTGGAGTCTGGGGGAGGCCTGGTCAAGCCTGGGGGGTCCCTGAGACTCTCCTGTGCAG |
| | VH (na) | CCTCTGGATTCACCTTCGGGAGCTATAGCATGGCTTGGGTCCGCCAGGCTCCAGGGAAGGGGCTGGAGTG |
| | | GGTCTCAGGTATTAGTAGTAGTAGTGGTTACATATACTACGCAGACTCAGTGAAGGGCCGATTCACCATC |
| | | TCCAGAGACAACGCCAAGAACTCACTGTATCTGCAAATGAACAGCCTGAGAGCCGAGGACACGGCGGTGT |
| | | ACTACTGCGCCAGAGATGTAGGAGGATACGCAGGGTACTACGGCATGGATGTATGGGGCCAGGGAACAAC |
| | | TGTCACCGTCTCCTCA |
| 1955 | BIIB-9-3621 | EVQLVESGGGLVKPGGSLRLSCAASGFTFGSYSMAWVRQAPGKGLEWVSGISSSSGYIYYADSVKGRFTI |
| | VH (aa) | SRDNAKNSLYLQMNSLRAEDTAVYYCARDVGGYAGYYGMDVWGQGTTVTVSS |
| 1956 | BIIB-9-3621 | GACATCCAGATGACCCAGTCTCCATCCTCCCTGTCTGCATCTGTAGGAGACAGAGTCACCATCACTTGCC |
| | VL (na) | AGGCGAGTCAGGACATTGCCAACTATTTAAATTGGTATCAGCAGAAACCAGGGAAAGCCCCTAAGCTCCT |
| | | GATCTACGATGCATCCAATTTGGAAACAGGGGTCCCATCAAGGTTCAGTGGAAGTGGATCTGGGACAGAT |
| | | TTTACTTTCACCATCAGCAGCCTGCAGCCTGAAGATATTGCAACATATTACTGTCAGCAGTACGCCAACT |
| | | TCCCTTACACTTTTGGCGGAGGGACCAAGGTTGAGATCAAA |
| 1957 | BIIB-9-3621 | DIQMTQSPSSLSASVGDRVTITCQASQDIANYLNWYQQKPGKAPKLLIYDASNLETGVPSRFSGSGSGTD |
| | VL (aa) | FTFTISSLQPEDIATYYCQQYANFPYTFGGGTKVEIK |
| 1958 | BIIB-9-3647 | GAGGTGCAGCTGGTGGAGTCTGGGGGAGGCCTGGTCAAGCCTGGGGGGTCCCTGAGACTCTCCTGTGCAG |
| | VH (na) | CCTCTGGATTCACCTTCAGTAGCTATGGTATGGTGTGGGTCCGCCAGGCTCCAGGGAAGGGGCTGGAGTG |
| | | GGTCTCATCCATTAGTAGTGCGAGTAGTTACATATACTACGCAGACTCAGTGAAGGGCCGATTCACCATC |
| | | TCCAGAGACAACGCCAAGAACTCACTGTATCTGCAAATGAACAGCCTGAGAGCCGAGGACACGGCGGTGT |
| | | ACTACTGCGCCAGAGATGTAGGAGGATACGCAGGGTACTACGGCATGGATGTATGGGGCCAGGGAACAAC |
| | | TGTCACCGTCTCCTCA |
| 1959 | BIIB-9-3647 | EVQLVESGGGLVKPGGSLRLSCAASGFTFSSYGMVWVRQAPGKGLEWVSSISSASSYIYYADSVKGRFTI |
| | VH (aa) | SRDNAKNSLYLQMNSLRAEDTAVYYCARDVGGYAGYYGMDVWGQGTTVTVSS |
| 1960 | BIIB-9-3647 | GACATCCAGATGACCCAGTCTCCATCCTCCCTGTCTGCATCTGTAGGAGACAGAGTCACCATCACTTGCC |
| | VL (na) | AGGCGAGTCAGGACATTGCCAACTATTTAAATTGGTATCAGCAGAAACCAGGGAAAGCCCCTAAGCTCCT |
| | | GATCTACGATGCATCCAATTTGGAAACAGGGGTCCCATCAAGGTTCAGTGGAAGTGGATCTGGGACAGAT |
| | | TTTACTTTCACCATCAGCAGCCTGCAGCCTGAAGATATTGCAACATATTACTGTCAGCAGTACGCCAACT |
| | | TCCCTTACACTTTTGGCGGAGGGACCAAGGTTGAGATCAAA |
| 1961 | BIIB-9-3647 | DIQMTQSPSSLSASVGDRVTITCQASQDIANYLNWYQQKPGKAPKLLIYDASNLETGVPSRFSGSGSGTD |
| | VL (aa) | FTFTISSLQPEDIATYYCQQYANFPYTFGGGTKVEIK |
| 1962 | BIIB-9-3649 | GAGGTGCAGCTGGTGGAGTCTGGGGGAGGCCTGGTCAAGCCTGGGGGGTCCCTGAGACTCTCCTGTGCAG |
| | VH (na) | CCTCTGGATTCACCTTCAGTAGCTATGGTATGGCTTGGGTCCGCCAGGCTCCAGGGAAGGGGCTGGAGTG |
| | | GGTCTCAGGTATTAGTAGTAGTTCGAGTTACATATACTACGCAGACTCAGTGAAGGGCCGATTCACCATC |
| | | TCCAGAGACAACGCCAAGAACTCACTGTATCTGCAAATGAACAGCCTGAGAGCCGAGGACACGGCGGTGT |
| | | ACTACTGCGCCAGAGATGTAGGAGGATACGCAGGGTACTACGGCATGGATGTATGGGGCCAGGGAACAAC |
| | | TGTCACCGTCTCCTCA |
| 1963 | BIIB-9-3649 | EVQLVESGGGLVKPGGSLRLSCAASGFTFSSYGMAWVRQAPGKGLEWVSGISSSSSYIYYADSVKGRFTI |
| | VH (aa) | SRDNAKNSLYLQMNSLRAEDTAVYYCARDVGGYAGYYGMDVWGQGTTVTVSS |
| 1964 | BIIB-9-3649 | GACATCCAGATGACCCAGTCTCCATCCTCCCTGTCTGCATCTGTAGGAGACAGAGTCACCATCACTTGCC |
| | VL (na) | AGGCGAGTCAGGACATTGCCAACTATTTAAATTGGTATCAGCAGAAACCAGGGAAAGCCCCTAAGCTCCT |
| | | GATCTACGATGCATCCAATTTGGAAACAGGGGTCCCATCAAGGTTCAGTGGAAGTGGATCTGGGACAGAT |
| | | TTTACTTTCACCATCAGCAGCCTGCAGCCTGAAGATATTGCAACATATTACTGTCAGCAGTACGCCAACT |
| | | TCCCTTACACTTTTGGCGGAGGGACCAAGGTTGAGATCAAA |
| 1965 | BIIB-9-3649 | DIQMTQSPSSLSASVGDRVTITCQASQDIANYLNWYQQKPGKAPKLLIYDASNLETGVPSRFSGSGSGTD |
| | VL (aa) | FTFTISSLQPEDIATYYCQQYANFPYTFGGGTKVEIK |
| 1966 | BIIB-9-3650 | GAGGTGCAGCTGGTGGAGTCTGGGGGAGGCTTGGTACAGCCTGGGGGGTCCCTGAGACTCTCCTGTGCAG |
| | VH (na) | CCTCTGGATTCACCTTCGGGAGCTATGAGATGAACTGGGTCCGCCAGGCTCCAGGGAAGGGGCTGGAGTG |
| | | GGTTTCAGCGATTAGTGCTAGTAGTAGTACCATATACTACGCAGACTCTGTGAAGGGCCGATTCACCATC |
| | | TCCAGAGACAATGCCAAGAACTCACTGTATCTGCAAATGAACAGCCTGAGAGCTGAGGACACGGCGGTGT |
| | | ACTACTGCGCCAGAGATGTAGGAGGATACGCAGGGTACTACGGCATGGATGTATGGGGCCAGGGAACAAC |
| | | TGTCACCGTCTCCTCA |
| 1967 | BIIB-9-3650 | EVQLVESGGGLVQPGGSLRLSCAASGFTFGSYEMNWVRQAPGKGLEWVSAISASSSTIYYADSVKGRFTI |
| | VH (aa) | SRDNAKNSLYLQMNSLRAEDTAVYYCARDVGGYAGYYGMDVWGQGTTVTVSS |
| 1968 | BIIB-9-3650 | GACATCCAGATGACCCAGTCTCCATCCTCCCTGTCTGCATCTGTAGGAGACAGAGTCACCATCACTTGCC |
| | VL (na) | AGGCGAGTCAGGACATTGCCAACTATTTAAATTGGTATCAGCAGAAACCAGGGAAAGCCCCTAAGCTCCT |
| | | GATCTACGATGCATCCAATTTGGAAACAGGGGTCCCATCAAGGTTCAGTGGAAGTGGATCTGGGACAGAT |
| | | TTTACTTTCACCATCAGCAGCCTGCAGCCTGAAGATATTGCAACATATTACTGTCAGCAGTACGCCAACT |
| | | TCCCTTACACTTTTGGCGGAGGGACCAAGGTTGAGATCAAA |
| 1969 | BIIB-9-3650 | DIQMTQSPSSLSASVGDRVTITCQASQDIANYLNWYQQKPGKAPKLLIYDASNLETGVPSRFSGSGSGTD |
| | VL (aa) | FTFTISSLQPEDIATYYCQQYANFPYTFGGGTKVEIK |
| 1970 | BIIB-9-3654 | GAGGTGCAGCTGGTGGAGTCTGGGGGAGGCCTGGTCAAGCCTGGGGGGTCCCTGAGACTCTCCTGTGCAG |
| | VH (na) | CCTCTGGATTCACCTTCGAGAGCTATAGCATGAACTGGGTCCGCCAGGCTCCAGGGAAGGGGCTGGAGTG |
| | | GGTCTCAGGGATTAGTAGTGCTAGTAGTTACATATACTACGCAGACTCAGTGAAGGGCCGATTCACCATC |
| | | TCCAGAGACAACGCCAAGAACTCACTGTATCTGCAAATGAACAGCCTGAGAGCCGAGGACACGGCGGTGT |
| | | ACTACTGCGCCAGAGATGTAGGAGGATACGCAGGGTACTACGGCATGGATGTATGGGGCCAGGGAACAAC |
| | | TGTCACCGTCTCCTCA |
| 1971 | BIIB-9-3654 | EVQLVESGGGLVKPGGSLRLSCAASGFTFESYSMNWVRQAPGKGLEWVSGISSASSYIYYADSVKGRFTI |
| | VH (aa) | SRDNAKNSLYLQMNSLRAEDTAVYYCARDVGGYAGYYGMDVWGQGTTVTVSS |
| 1972 | BIIB-9-3654 | GACATCCAGATGACCCAGTCTCCATCCTCCCTGTCTGCATCTGTAGGAGACAGAGTCACCATCACTTGCC |
| | VL (na) | AGGCGAGTCAGGACATTGCCAACTATTTAAATTGGTATCAGCAGAAACCAGGGAAAGCCCCTAAGCTCCT |
| | | GATCTACGATGCATCCAATTTGGAAACAGGGGTCCCATCAAGGTTCAGTGGAAGTGGATCTGGGACAGAT |
| | | TTTACTTTCACCATCAGCAGCCTGCAGCCTGAAGATATTGCAACATATTACTGTCAGCAGTACGCCAACT |
| | | TCCCTTACACTTTTGGCGGAGGGACCAAGGTTGAGATCAAA |
| 1973 | BIIB-9-3654 | DIQMTQSPSSLSASVGDRVTITCQASQDIANYLNWYQQKPGKAPKLLIYDASNLETGVPSRFSGSGSGTD |
| | VL (aa) | FTFTISSLQPEDIATYYCQQYANFPYTFGGGTKVEIK |

Parent Antibody: BIIB-9-1336

| | | |
|---|---|---|
| 1974 | BIIB-9-3753 | GAGGTGCAGCTGGTGGAGTCTGGGGGAGGCCTGGTCAAGCCTGGGGGGTCCCTGAGACTCTCCTGTGCAG |
| | VH (na) | CCTCTGGATTCACCTTCGGGAGCTATGATATGAACTGGGTCCGCCAGGCTCCAGGGAAGGGGCTGGAGTG |
| | | GGTCTCATCCATTAGTGACAGTGCAAGTTACATAGCCTACGCAGACTCAGTGAAGGGCCGATTCACCATC |
| | | TCCAGAGACAACGCCAAGAACTCACTGTATCTGCAAATGAACAGCCTGAGAGCCGAGGACACGGCGGTGT |
| | | ACTACTGCGCCAGAGATGTTTCGGGATACGCAGGGTACTACGGCATGGATGTATGGGGGCAAGGGACCAC |
| | | GGTCACCGTCTCCTCA |
| 1975 | BIIB-9-3753 | EVQLVESGGGLVKPGGSLRLSCAASGFTFGSYDMNWVRQAPGKGLEWVSSISDSASYIAYADSVKGRFTI |
| 1976 | BIIB-9-3753 | GACATCCAGATGACCCAGTCTCCATCCTCCCTGTCTGCATCTGTAGGAGACAGAGTCACCATCACTTGCC |
| | VL (na) | AGGCGAGTCAGGACATTGCCAACTATTTAAATTGGTATCAGCAGAAACCAGGGAAAGCCCCTAAGCTCCT |
| | | GATCTACGATGCATCCAATTTGGAAACAGGGGTCCCATCAAGGTTCAGTGGAAGTGGATCTGGGACAGAT |
| | | TTTACTTTCACCATCAGCAGCCTGCAGCCTGAAGATATTGCAACATATTACTGTCAGCAGTACGCCAACT |
| | | TCCCTTACACTTTTGGCGGAGGGACCAAGGTTGAGATCAAA |
| 1977 | BIIB-9-3753 | DIQMTQSPSSLSASVGDRVTITCQASQDIANYLNWYQQKPGKAPKLLIYDASNLETGVPSRFSGSGSGTD |
| | VL (aa) | FTFTISSLQPEDIATYYCQQYANFPYTFGGGTKVEIK |
| 1978 | BIIB-9-3754 | GAGGTGCAGCTGGTGGAGTCTGGGGGAGGCCTGGTCAAGCCTGGGGGGTCCCTGAGACTCTCCTGTGCAG |
| | VH (na) | CCTCTGGATTCACCTTCGGGAGCTATGATATGAACTGGGTCCGCCAGGCTCCAGGGAAGGGGCTGGAGTG |
| | | GGTCTCATCCATTAGTAGTGGTGAGAGTTACATATACTACGCAGAGTCAGTGAAGGGCCGATTCACCATC |
| | | TCCAGAGACAACGCCAAGAACTCACTGTATCTGCAAATGAACAGCCTGAGAGCCGAGGACACGGCGGTGT |
| | | ACTACTGCGCCAGAGATGTAGGAGGATACGCAGGGTTTTATGGCATGGATGTATGGGGGCAAGGGACCAC |
| | | GGTCACCGTCTCCTCA |
| 1979 | BIIB-9-3754 | EVQLVESGGGLVKPGGSLRLSCAASGFTFGSYDMNWVRQAPGKGLEWVSSISSGESYIYYAESVKGRFTI |
| | VH (aa) | SRDNAKNSLYLQMNSLRAEDTAVYYCARDVGGYAGFYGMDVWGQGTTVTVSS |
| 1980 | BIIB-9-3754 | GACATCCAGATGACCCAGTCTCCATCCTCCCTGTCTGCATCTGTAGGAGACAGAGTCACCATCACTTGCC |
| | VL (na) | AGGCGAGTCAGGACATTGCCAACTATTTAAATTGGTATCAGCAGAAACCAGGGAAAGCCCCTAAGCTCCT |
| | | GATCTACGATGCATCCAATTTGGAAACAGGGGTCCCATCAAGGTTCAGTGGAAGTGGATCTGGGACAGAT |
| | | TTTACTTTCACCATCAGCAGCCTGCAGCCTGAAGATATTGCAACATATTACTGTCAGCAGTACGCCAACT |
| | | TCCCTTACACTTTTGGCGGAGGGACCAAGGTTGAGATCAAA |
| 1981 | BIIB-9-3754 | DIQMTQSPSSLSASVGDRVTITCQASQDIANYLNWYQQKPGKAPKLLIYDASNLETGVPSRFSGSGSGTD |
| | VL (aa) | FTFTISSLQPEDIATYYCQQYANFPYTFGGGTKVEIK |
| 1982 | BIIB-9-3756 | GAGGTGCAGCTGGTGGAGTCTGGGGGAGGCCTGGTCAAGCCTGGGGGGTCCCTGAGACTCTCCTGTGCAG |
| | VH (na) | CCTCTGGATTCACCTTCGGGAGCTATGATATGAACTGGGTCCGCCAGGCTCCAGGGAAGGGGCTGGAGTG |
| | | GGTCTCATCCATTAGTAGTGGTGAGAGTTACATATACTACGCAGAGTCAGTGAAGGGCCGATTCACCATC |
| | | TCCAGAGACAACGCCAAGAACTCACTGTATCTGCAAATGAACAGCCTGAGAGCCGAGGACACGGCGGTGT |
| | | ACTACTGCGTCAGAGATGTAGGAGGATACGCAGGGTACTACGGCATGGATGTATGGGGGCAAGGGACCAC |
| | | GGTCACCGTCTCCTCA |
| 1983 | BIIB-9-3756 | EVQLVESGGGLVKPGGSLRLSCAASGFTFGSYDMNWVRQAPGKGLEWVSSISSGESYIYYAESVKGRFTI |
| | VH (aa) | SRDNAKNSLYLQMNSLRAEDTAVYYCVRDVGGYAGYYGMDVWGQGTTVTVSS |
| 1984 | BIIB-9-3756 | GACATCCAGATGACCCAGTCTCCATCCTCCCTGTCTGCATCTGTAGGAGACAGAGTCACCATCACTTGCC |
| | VL (na) | AGGCGAGTCAGGACATTGCCAACTATTTAAATTGGTATCAGCAGAAACCAGGGAAAGCCCCTAAGCTCCT |
| | | GATCTACGATGCATCCAATTTGGAAACAGGGGTCCCATCAAGGTTCAGTGGAAGTGGATCTGGGACAGAT |
| | | TTTACTTTCACCATCAGCAGCCTGCAGCCTGAAGATATTGCAACATATTACTGTCAGCAGTACGCCAACT |
| | | TCCCTTACACTTTTGGCGGAGGGACCAAGGTTGAGATCAAA |
| 1985 | BIIB-9-3756 | DIQMTQSPSSLSASVGDRVTITCQASQDIANYLNWYQQKPGKAPKLLIYDASNLETGVPSRFSGSGSGTD |
| | VL (aa) | FTFTISSLQPEDIATYYCQQYANFPYTFGGGTKVEIK |
| 1986 | BIIB-9-3764 | GAGGTGCAGCTGGTGGAGTCTGGGGGAGGCCTGGTCAAGCCTGGGGGGTCCCTGAGACTCTCCTGTGCAG |
| | VH (na) | CCTCTGGATTCACCTTCGGGAGCTATGATATGAACTGGGTCCGCCAGGCTCCAGGGAAGGGGCTGGAGTG |
| | | GGTCTCATCCATTAGTAGTGGTGAGAGTTACATATACTACGCAGAGTCAGTGAAGGGCCGATTCACCATC |
| | | TCCAGAGACAACGCCAAGAACTCACTGTATCTGCAAATGAACAGCCTGAGAGCCGAGGACACGGCGGTGT |
| | | ACTACTGCGCCAGAGATGTAGGAGGATACGCAGGGTACTACGGCATGGATGTATGGGGCCAGGGAACAAC |
| | | TGTCACCGTCTCCTCA |
| 1987 | BIIB-9-3764 | EVQLVESGGGLVKPGGSLRLSCAASGFTFGSYDMNWVRQAPGKGLEWVSSISSGESYIYYAESVKGRFTI |
| | VH (aa) | SRDNAKNSLYLQMNSLRAEDTAVYYCARDVGGYAGYYGMDVWGQGTTVTVSS |
| 1988 | BIIB-9-3764 | GACATCCAGATGACCCAGTCTCCATCCTCCCTGTCTGCATCTGTAGGAGACAGAGTCACCATCACTTGCG |
| | VL (na) | GAGCGAATCAGTACATTAGCGACTATTTAAATTGGTATCAGCAGAAACCAGGGAAAGCCCCTAAGCTCCT |
| | | GATCTACGATGCAGCCAATTTGCACACAGGGGTCCCATCAAGGTTCAGTGGAAGTGGATCTGGGACAGAT |
| | | TTTACTTTCACCATCAGCAGCCTGCAGCCTGAAGATATTGCAACATATTACTGTCAGCAGTACGCCAGGT |
| | | TCCCTTACACTTTCGGCGGAGGGACCAAGGTTGAGATCAAA |
| 1989 | BIIB-9-3764 | DIQMTQSPSSLSASVGDRVTITCGANQYISDYLNWYQQKPGKAPKLLIYDAANLHTGVPSRFSGSGSGTD |
| | VL (aa) | FTFTISSLQPEDIATYYCQQYARFPYTFGGGTKVEIK |
| 1990 | BIIB-9-3766 | GAGGTGCAGCTGGTGGAGTCTGGGGGAGGCCTGGTCAAGCCTGGGGGGTCCCTGAGACTCTCCTGTGCAG |
| | VH (na) | CCTCTGGATTCACCTTCGGGAGCTATGATATGAACTGGGTCCGCCAGGCTCCAGGGAAGGGGCTGGAGTG |
| | | GGTCTCATCCATTAGTAGTGGTGAGAGTTACATATACTACGCAGAGTCAGTGAAGGGCCGATTCACCATC |
| | | TCCAGAGACAACGCCAAGAACTCACTGTATCTGCAAATGAACAGCCTGAGAGCCGAGGACACGGCGGTGT |
| | | ACTACTGCGCCAGAGATGTAGGAGGATACGCAGGGTACTACGGCATGGATGTATGGGGCCAGGGAACAAC |
| | | TGTCACCGTCTCCTCA |
| 1991 | BIIB-9-3766 | EVQLVESGGGLVKPGGSLRLSCAASGFTFGSYDMNWVRQAPGKGLEWVSSISSGESYIYYAESVKGRFTI |
| | VH (aa) | SRDNAKNSLYLQMNSLRAEDTAVYYCARDVGGYAGYYGMDVWGQGTTVTVSS |
| 1992 | BIIB-9-3766 | GACATCCAGATGACCCAGTCTCCATCCTCCCTGTCTGCATCTGTAGGAGACAGAGTCACCATCACTTGCG |
| | VL (na) | AAGCGAGTGAAGACATTAGCAACTATTTAAATTGGTATCAGCAGAAACCAGGGAAAGCCCCTAAGCTCCT |
| | | GATCTACGATGCATCCAATTTGCAATACGGGGTCCCATCAAGGTTCAGTGGAAGTGGATCTGGGACAGAT |
| | | TTTACTTTCACCATCAGCAGCCTGCAGCCTGAAGATATTGCAACATATTACTGTAGTCAGTACGCCAACT |
| | | TCCCTTACACTTTCGGCGGAGGGACCAAGGTTGAGATCAAA |
| 1993 | BIIB-9-3766 | DIQMTQSPSSLSASVGDRVTITCEASEDISNYLNWYQQKPGKAPKLLIYDASNLQYGVPSRFSGSGSGTD |
| | VL (aa) | FTFTISSLQPEDIATYYCSQYANFPYTFGGGTKVEIK |

Parent Antibody: BIIB-9-619

| | | |
|---|---|---|
| 1994 | BIIB-9-3707 | CAGGTGCAGCTGGTGCAGTCTGGGGCTGAGGTGAGGAAGCCTGGGGCCTCAGTGAAGGTTTCCTGCAAGG |
| | VH (na) | CATCTGGATACACCTTCACCAGCTACTATATGCACTGGGTGCGACAGGCCCCTGGACAAGGGCTTGAGTG |
| | | GATGGGAATAATCAACCCTAGTGGTGGTAGCACAAGCTACGCACAGAAGTTCCAGGGCAGAGTCACCATG |
| | | ACCAGGGACACGTCCACGAGCACAGTCTACATGGAGCTGAGCAGCCTGAGATCTGAGGACACGGCGGTGT |
| | | ACTACTGCGCCAGAGACGGACCAAGAGAGTCGGACTACTACATGGACGTATGGGGCAAAGGGACCACGGT |
| | | CACCGTCTCCTCA |
| 1995 | BIIB-9-3707 | QVQLVQSGAEVRKPGASVKVSCKASGYTFTSYYMHWVRQAPGQGLEWMGIINPSGGSTSYAQKFQGRVTM |
| | VH faa) | TRDTSTSTVYMELSSLRSEDTAVYYCARDGPRESDYYMDVWGKGTTVTVSS |
| 1996 | BIIB-9-3707 | GAAATTGTGTTGACACAGTCTCCAGCCACCCTGTCTTTGTCTCCAGGGGAAAGAGCCACCCTCTCCTGCA |
| | VL (na) | GGGCCAGTCAGAGTGTTAGCAGCTACTTAGCCTGGTACCAACAGAAACCTGGCCAGGCTCCCAGGCTCCT |
| | | CATCTATGATGCATCCAACAGGGCCACTGGCATCCCAGCCAGGTTCAGTGGCAGTGGGTCTGGGACAGAC |
| | | TTCACTCTCACCATCAGCAGCCTAGAGCCTGAAGATTTTGCAGTTTATTACTGTCAGCAGAGAGACAACT |
| | | GGCCTTTCACTTTTGGCGGAGGGACCAAGGTTGAGATCAAA |
| 1997 | BIIB-9-3707 | EIVLTQSPATLSLSPGERATLSCRASQSVSSYLAWYQQKPGQAPRLLIYDASNRATGIPARFSGSGSGTD |
| | VL (aa) | FTLTISSLEPEDFAVYYCQQRDNWPFTFGGGTKVEIK |
| 1998 | BIIB-9-3709 | CAGGTGCAGCTGGTGCAGTCTGGGGCTGAGGTGAGGAAGCCTGGGGCCTCAGTGAAGGTTTCCTGCAAGG |
| | VH (na) | CATCTGGATACACCTTCACCAGCTACTATATGCACTGGGTGCGACAGGCCCCTGGACAAGGGCTTGAGTG |
| | | GGTGGGAATAATCAACCCTAGTGGTGGTAGCACAAGCTACGCACAGAAGTTCCAGGGCAGAGTCACCATG |
| | | ACCAGGGACACGTCCACGAGCACAGTCTACATGGAGCTGAGCAGCCTGAGATCTGAGGACACGGCGGTGT |
| | | ACTACTGCGCCAGAGACGGACCAAGAGATGTGGACTACTACATGGACGTATGGGGCAAAGGGACCACGGT |
| | | CACCGTCTCCTCA |
| 1999 | BIIB-9-3709 | QVQLVQSGAEVRKPGASVKVSCKASGYTFTSYYMHWVRQAPGQGLEWVGIINPSGGSTSYAQKFQGRVTM |
| | VH (aa) | TRDTSTSTVYMELSSLRSEDTAVYYCARDGPRDVDYYMDVWGKGTTVTVSS |
| 2000 | BIIB-9-3709 | GAAATTGTGTTGACACAGTCTCCAGCCACCCTGTCTTTGTCTCCAGGGGAAAGAGCCACCCTCTCCTGCA |
| | VL (na) | GGGCCAGTCAGAGTGTTAGCAGCTACTTAGCCTGGTACCAACAGAAACCTGGCCAGGCTCCCAGGCTCCT |
| | | CATCTATGATGCATCCAACAGGGCCACTGGCATCCCAGCCAGGTTCAGTGGCAGTGGGTCTGGGACAGAC |
| | | TTCACTCTCACCATCAGCAGCCTAGAGCCTGAAGATTTTGCAGTTTATTACTGTCAGCAGAGAGACAACT |
| | | GGCCTTTCACTTTTGGCGGAGGGACCAAGGTTGAGATCAAA |
| 2001 | BIIB-9-3709 | EIVLTQSPATLSLSPGERATLSCRASQSVSSYLAWYQQKPGQAPRLLIYDASNRATGIPARFSGSGSGTD |
| | VL (aa) | FTLTISSLEPEDFAVYYCQQRDNWPFTFGGGTKVEIK |
| 2002 | BIIB-9-3720 | CAGGTGCAGCTGGTGCAGTCTGGGGCTGAGGTGAGGAAGCCTGGGGCCTCAGTGAAGGTTTCCTGCAAGG |
| | VH (na) | CATCTGGATACACCTTCACCAGCTACTATATGCACTGGGTGCGACAGGCCCCTGGACAAGGGCTTGAGTG |
| | | GATGGGAATAATCAACCCTAGTGGTGGTAGCACAAGCTACGCACAGAAGTTCCAGGGCAGAGTCACCATG |
| | | ACCAGGGACACGTCCACGAGCACAGTCTACATGGAGCTGAGCAGCCTGAGATCTGAGGACACGGCGGTGT |
| | | ACTACTGCGCCAGAGACGGACCACAGCTTAGTGACTACTACATGGACGTATGGGGCAAAGGGACCACGGT |
| | | CACCGTCTCCTCA |
| 2003 | BIIB-9-3720 | QVQLVQSGAEVRKPGASVKVSCKASGYTFTSYYMHWVRQAPGQGLEWMGIINPSGGSTSYAQKFQGRVTM |
| | VH (aa) | TRDTSTSTVYMELSSLRSEDTAVYYCARDGPQLSDYYMDVWGKGTTVTVSS |
| 2004 | BIIB-9-3720 | GAAATTGTGTTGACACAGTCTCCAGCCACCCTGTCTTTGTCTCCAGGGGAAAGAGCCACCCTCTCCTGCA |
| | VL (na) | GGGCCAGTCAGAGTGTTAGCAGCTACTTAGCCTGGTACCAACAGAAACCTGGCCAGGCTCCCAGGCTCCT |
| | | CATCTATGATGCATCCAACAGGGCCACTGGCATCCCAGCCAGGTTCAGTGGCAGTGGGTCTGGGACAGAC |
| | | TTCACTCTCACCATCAGCAGCCTAGAGCCTGAAGATTTTGCAGTTTATTACTGTCAGCAGAGAGACAACT |
| | | GGCCTTTCACTTTTGGCGGAGGGACCAAGGTTGAGATCAAA |
| 2005 | BIIB-9-3720 | EIVLTQSPATLSLSPGERATLSCRASQSVSSYLAWYQQKPGQAPRLLIYDASNRATGIPARFSGSGSGTD |
| | VL (aa) | FTLTISSLEPEDFAVYYCQQRDNWPFTFGGGTKVEIK |
| 2006 | BIIB-9-3727 | CAGGTGCAGCTGGTGCAGTCTGGGGCTGAGGTGAAGAAGCCTGGGGCCTCAGTGAAGGTTTCCTGCAAGG |
| | VH (na) | CATCTGGATACACCTTCCATCATTACTATATGCACTGGGTGCGACAGGCCCCTGGACAAGGGCTTGAGTG |
| | | GATGGGAATAATCAACCCTAGTGGTGGTCGGACAGAGTACGCACAGAAGTTCCAGGGCAGAGTCACCATG |
| | | ACCAGGGACACGTCCACGAGCACAGTCTACATGGAGCTGAGCAGCCTGAGATCTGAGGACACGGCGGTGT |
| | | ACTACTGCGCCAGAGACGGACCAAGAGTCAGTGACTACTACATGGACGTATGGGGCAAGGGTACAACTGT |
| | | CACCGTCTCCTCA |
| 2007 | BIIB-9-3727 | QVQLVQSGAEVKKPGASVKVSCKASGYTFHHYYMHWVRQAPGQGLEWMGIINPSGGRTEYAQKFQGRVTM |
| | VH (aa) | TRDTSTSTVYMELSSLRSEDTAVYYCARDGPRVSDYYMDVWGKGTTVTVSS |
| 2008 | BIIB-9-3727 | GAAATTGTGTTGACACAGTCTCCAGCCACCCTGTCTTTGTCTCCAGGGGAAAGAGCCACCCTCTCCTGCA |
| | VL (na) | GGGCCAGTCAGAGTGTTAGCAGCTACTTAGCCTGGTACCAACAGAAACCTGGCCAGGCTCCCAGGCTCCT |
| | | CATCTATGATGCATCCAACAGGGCCACTGGCATCCCAGCCAGGTTCAGTGGCAGTGGGTCTGGGACAGAC |
| | | TTCACTCTCACCATCAGCAGCCTAGAGCCTGAAGATTTTGCAGTTTATTACTGTCAGCAGAGAGACAACT |
| | | GGCCTTTCACTTTTGGCGGAGGGACCAAGGTTGAGATCAAA |
| 2009 | BIIB-9-3727 | EIVLTQSPATLSLSPGERATLSCRASQSVSSYLAWYQQKPGQAPRLLIYDASNRATGIPARFSGSGSGTD |
| | VL (aa) | FTLTISSLEPEDFAVYYCQQRDNWPFTFGGGTKVEIK |
| 2010 | BIIB-9-3745 | CAGGTGCAGCTGGTGCAGTCTGGGGCTGAGGTGAAGAAGCCTGGGGCCTCAGTGAAGGTTTCCTGCAAGG |
| | VH (na) | CATCTGGATACACCTTCACCGGTTACCCTATGCACTGGGTGCGACAGGCCCCTGGACAAGGGCTTGAGTG |
| | | GATGGGATCGATCAACCCTAGTCGTGGTAGCACAAGCTACGCACAGAAGTTCCAGGGCAGAGTCACCATG |
| | | ACCAGGGACACGTCCACGAGCACAGTCTACATGGAGCTGAGCAGCCTGAGATCTGAGGACACGGCGGTGT |
| | | ACTACTGCGCCAGAGACGGACCAAGAGTCAGTGACTACTACATGGACGTATGGGGCAAGGGTACAACTGT |
| | | CACCGTCTCCTCA |
| 2011 | BIIB-9-3745 | QVQLVQSGAEVKKPGASVKVSCKASGYTFTGYPMHWVRQAPGQGLEWMGSINPSRGSTSYAQKFQGRVTM |
| | VH (aa) | TRDTSTSTVYMELSSLRSEDTAVYYCARDGPRVSDYYMDVWGKGTTVTVSS |
| 2012 | BIIB-9-3745 | GAAATTGTGTTGACACAGTCTCCAGCCACCCTGTCTTTGTCTCCAGGGGAAAGAGCCACCCTCTCCTGCA |
| | VL (na) | GGGCCAGTCAGAGTGTTAGCAGCTACTTAGCCTGGTACCAACAGAAACCTGGCCAGGCTCCCAGGCTCCT |
| | | CATCTATGATGCATCCAACAGGGCCACTGGCATCCCAGCCAGGTTCAGTGGCAGTGGGTCTGGGACAGAC |
| | | TTCACTCTCACCATCAGCAGCCTAGAGCCTGAAGATTTTGCAGTTTATTACTGTCAGCAGAGAGACAACT |
| | | GGCCTTTCACTTTTGGCGGAGGGACCAAGGTTGAGATCAAA |
| 2013 | BIIB-9-3745 | EIVLTQSPATLSLSPGERATLSCRASQSVSSYLAWYQQKPGQAPRLLIYDASNRATGIPARFSGSGSGTD |
| | VL (aa) | FTLTISSLEPEDFAVYYCQQRDNWPFTFGGGTKVEIK |

Parent Antibody: BIIB-9-578

| | | |
|---|---|---|
| 2014 | BIIB-9-3780 | CAGCTGCAGCTGCAGGAGTCGGGCCCAGGACTGGTGAAGCCTTCGGAGACCCTGTCCCTCACCTGCACTG |
| | VH (na) | TCTCTGGTGGCTCCATCAGCAGTAGTAGTTACTACTGGGGCTGGATCCGCCAGCCCCCAGGGAAGGGGCT |
| | | GGAGTGGATTGGGAGTATCTCCTATAGTGGGAGCACCTACTACAACCCGTCCCTCAAGAGTCGAGTCACC |
| | | ATATCCGTAGACACGTCCAAGAACCAGTTCTCCCTGAAGCTGAGTTCTGTGACCGCCGCAGACACGGCGG |
| | | TGTACTACTGCGCTAGAGATAAGTACCAAGACTATAGTGTTGACATATGGGGCCAAGGGACAATGGTCAC |
| | | CGTCTCCTCA |
| 2015 | BIIB-9-3780 | QLQLQESGPGLVKPSETLSLTCTVSGGSISSSSYYWGWIRQPPGKGLEWIGSISYSGSTYYNPSLKSRVT |
| | VH (aa) | ISVDTSKNQFSLKLSSVTAADTAVYYCARDKYQDYSVDIWGQGTMVTVSS |
| 2016 | BIIB-9-3780 | GACATCCAGATGACCCAGTCTCCATCTTCCGTGTCTGCATCTGTAGGAGACAGAGTCACCATCACTTGTC |
| | VL (na) | GGGCGAGTCAGGGTATTGACAGCTGGTTAGCCTGGTATCAGCAGAAACCAGGGAAAGCCCCTAAGCTCCT |
| | | GATCTATGCTGCATCCAGTTTGCAAAGTGGGGTCCCATCAAGGTTCAGCGGCAGTGGATCTGGGACAGAT |
| | | TTCACTCTCACCATCAGCAGCCTGCAGCCTGAAGATTTTGCAACTTATTACTGTCAGCAGGCAAATTTCC |
| | | TCCCTTTCACTTTTGGCGGAGGGACCAAGGTTGAGATCAAA |
| 2017 | BIIB-9-3780 | DIQMTQSPSSVSASVGDRVTITCRASQGIDSWLAWYQQKPGKAPKLLIYAASSLQSGVPSRFSGSGSGTD |
| | VL (aa) | FTLTISSLQPEDFATYYCQQANFLPFTFGGGTKVEIK |
| 2018 | BIIB-9-3675 | CAGCTGCAGCTGCAGGAGTCGGGCCCAGGACTGGTGAAGCCTTCGGAGACCCTGTCCCTCACCTGCACTG |
| | VH (na) | TCTCTGGTGGCTCCATCAGCAGTACGAGTTACTACTGGGTGTGGATCCGCCAGCCCCCAGGGAAGGGGCT |
| | | GGAGTGGATTGGGAGTATCACTGCGAGTGGGAGCACCTACTACAACCCGTCCCTCAAGAGTCGAGTCACC |
| | | ATATCCGTAGACACGTCCAAGAACCAGTTCTCCCTGAAGCTGAGTTCTGTGACCGCCGCAGACACGGCGG |
| | | TGTACTACTGCGCCAGAGATAAGTACCAAGACTATTCATTCGACATATGGGGTCAGGGTACAATGGTCAC |
| | | CGTCTCCTCA |
| 2019 | BIIB-9-3675 | QLQLQESGPGLVKPSETLSLTCTVSGGSISSTSYYWVWIRQPPGKGLEWIGSITASGSTYYNPSLKSRVT |
| | VH (aa) | ISVDTSKNQFSLKLSSVTAADTAVYYCARDKYQDYSFDIWGQGTMVTVSS |
| 2020 | BIIB-9-3675 | GACATCCAGATGACCCAGTCTCCATCTTCCGTGTCTGCATCTGTAGGAGACAGAGTCACCATCACTTGTC |
| | VL (na) | GGGCGAGTCAGGGTATTGACAGCTGGTTAGCCTGGTATCAGCAGAAACCAGGGAAAGCCCCTAAGCTCCT |
| | | GATCTATGCTGCATCCAGTTTGCAAAGTGGGGTCCCATCAAGGTTCAGCGGCAGTGGATCTGGGACAGAT |
| | | TTCACTCTCACCATCAGCAGCCTGCAGCCTGAAGATTTTGCAACTTATTACTGTCAGCAGGCAAATTTCC |
| | | TCCCTTTCACTTTTGGCGGAGGGACCAAGGTTGAGATCAAA |
| 2021 | BIIB-9-3675 | DIQMTQSPSSVSASVGDRVTITCRASQGIDSWLAWYQQKPGKAPKLLIYAASSLQSGVPSRFSGSGSGTD |
| | VL (aa) | FTLTISSLQPEDFATYYCQQANFLPFTFGGGTKVEIK |
| 2022 | BIIB-9-3681 | CAGCTGCAGCTGCAGGAGTCGGGCCCAGGACTGGTGAAGCCTTCGGAGACCCTGTCCCTCACCTGCACTG |
| | VH (na) | TCTCTGGTGGCTCCATCAGCAGTGGGAGTTACTACTGGAATTGGATCCGCCAGCCCCCAGGGAAGGGGCT |
| | | GGAGTGGATTGGGAGTATCCAGCCTAGTGGGAGCACCTACTACAACCCGTCCCTCAAGAGTCGAGTCACC |
| | | ATATCCGTAGACACGTCCAAGAACCAGTTCTCCCTGAAGCTGAGTTCTGTGACCGCCGCAGACACGGCGG |
| | | TGTACTACTGCGCTAGAGATAAGTACCAAGACTATTCATTCGACATATGGGGTCAGGGTACAATGGTCAC |
| | | CGTCTCCTCA |
| 2023 | BIIB-9-3681 | QLQLQESGPGLVKPSETLSLTCTVSGGSISSGSYYWNWIRQPPGKGLEWIGSIQPSGSTYYNPSLKSRVT |
| | VH (aa) | ISVDTSKNQFSLKLSSVTAADTAVYYCARDKYQDYSFDIWGQGTMVTVSS |
| 2024 | BIIB-9-3681 | GACATCCAGATGACCCAGTCTCCATCTTCCGTGTCTGCATCTGTAGGAGACAGAGTCACCATCACTTGTC |
| | VL (na) | GGGCGAGTCAGGGTATTGACAGCTGGTTAGCCTGGTATCAGCAGAAACCAGGGAAAGCCCCTAAGCTCCT |
| | | GATCTATGCTGCATCCAGTTTGCAAAGTGGGGTCCCATCAAGGTTCAGCGGCAGTGGATCTGGGACAGAT |
| | | TTCACTCTCACCATCAGCAGCCTGCAGCCTGAAGATTTTGCAACTTATTACTGTCAGCAGGCAAATTTCC |
| | | TCCCTTTCACTTTTGGCGGAGGGACCAAGGTTGAGATCAAA |
| 2025 | BIIB-9-3681 | DIQMTQSPSSVSASVGDRVTITCRASQGIDSWLAWYQQKPGKAPKLLIYAASSLQSGVPSRFSGSGSGTD |
| | VL (aa) | FTLTISSLQPEDFATYYCQQANFLPFTFGGGTKVEIK |
| 2026 | BIIB-9-3684 | CAGCTGCAGCTGCAGGAGTCGGGCCCAGGACTGGTGAAGCCTTCGGAGACCCTGTCCCTCACCTGCACTG |
| | VH (na) | TCTCTGGTGGCTCCATCAGCAGTGTTAGTTACTACTGGAATTGGATCCGCCAGCCCCCAGGGAAGGGGCT |
| | | GGAGTGGATTGGGAGTATCACTTATAGTGGGAGCACCCAGTACAACCCGTCCCTCAAGAGTCGAGTCACC |
| | | ATATCCGTAGACACGTCCAAGAACCAGTTCTCCCTGAAGCTGAGTTCTGTGACCGCCGCAGACACGGCGG |
| | | TGTACTACTGCGCTAGAGATAAGTACCAAGACTATTCATTCGACATATGGGGTCAGGGTACAATGGTCAC |
| | | CGTCTCCTCA |
| 2027 | BIIB-9-3684 | QLQLQESGPGLVKPSETLSLTCTVSGGSISSVSYYWNWIRQPPGKGLEWIGSITYSGSTQYNPSLKSRVT |
| | VH (aa) | ISVDTSKNQFSLKLSSVTAADTAVYYCARDKYQDYSFDIWGQGTMVTVSS |
| 2028 | BIIB-9-3684 | GACATCCAGATGACCCAGTCTCCATCTTCCGTGTCTGCATCTGTAGGAGACAGAGTCACCATCACTTGTC |
| | VL (na) | GGGCGAGTCAGGGTATTGACAGCTGGTTAGCCTGGTATCAGCAGAAACCAGGGAAAGCCCCTAAGCTCCT |
| | | GATCTATGCTGCATCCAGTTTGCAAAGTGGGGTCCCATCAAGGTTCAGCGGCAGTGGATCTGGGACAGAT |
| | | TTCACTCTCACCATCAGCAGCCTGCAGCCTGAAGATTTTGCAACTTATTACTGTCAGCAGGCAAATTTCC |
| | | TCCCTTTCACTTTTGGCGGAGGGACCAAGGTTGAGATCAAA |
| 2029 | BIIB-9-3684 | DIQMTQSPSSVSASVGDRVTITCRASQGIDSWLAWYQQKPGKAPKLLIYAASSLQSGVPSRFSGSGSGTD |
| | VL (aa) | FTLTISSLQPEDFATYYCQQANFLPFTFGGGTKVEIK |
| 2030 | BIIB-9-3698 | CAGCTGCAGCTGCAGGAGTCGGGCCCAGGACTGGTGAAGCCTTCGGAGACCCTGTCCCTCACCTGCACTG |
| | VH (na) | TCTCTGGTGGCTCCATCGCTAGTAGTAGTTACTACTGGTCGTGGATCCGCCAGCCCCCAGGGAAGGGGCT |
| | | GGAGTGGATTGGGAGTATCCGGGGTAGTGGGAGCACCTACTACAACCCGTCCCTCAAGAGTCGAGTCACC |
| | | ATATCCGTAGACACGTCCAAGAACCAGTTCTCCCTGAAGCTGAGTTCTGTGACCGCCGCAGACACGGCGG |
| | | TGTACTACTGCGCTAGAGATAAGTACCAAGACTATTCATTCGACATATGGGGTCAGGGTACAATGGTCAC |
| | | CGTCTCCTCA |
| 2031 | BIIB-9-3698 | QLQLQESGPGLVKPSETLSLTCTVSGGSIASSSYYWSWIRQPPGKGLEWIGSIRGSGSTYYNPSLKSRVT |
| | VH (aa) | ISVDTSKNQFSLKLSSVTAADTAVYYCARDKYQDYSFDIWGQGTMVTVSS |
| 2032 | BIIB-9-3698 | GACATCCAGATGACCCAGTCTCCATCTTCCGTGTCTGCATCTGTAGGAGACAGAGTCACCATCACTTGTC |
| | VL (na) | GGGCGAGTCAGGGTATTGACAGCTGGTTAGCCTGGTATCAGCAGAAACCAGGGAAAGCCCCTAAGCTCCT |
| | | GATCTATGCTGCATCCAGTTTGCAAAGTGGGGTCCCATCAAGGTTCAGCGGCAGTGGATCTGGGACAGAT |
| | | TTCACTCTCACCATCAGCAGCCTGCAGCCTGAAGATTTTGCAACTTATTACTGTCAGCAGGCAAATTTCC |
| | | TCCCTTTCACTTTTGGCGGAGGGACCAAGGTTGAGATCAAA |
| 2033 | BIIB-9-3698 | DIQMTQSPSSVSASVGDRVTITCRASQGIDSWLAWYQQKPGKAPKLLIYAASSLQSGVPSRFSGSGSGTD |
| | VL (aa) | FTLTISSLQPEDFATYYCQQANFLPFTFGGGTKVEIK |
| 2034 | BIIB-9-3704 | CAGGTGCAGCTGCAGGAGTCGGGCCCAGGACTGGTGAAGCCTTCACAGACCCTGTCCCTCACCTGTACTG |
| | VH (na) | TCTCTGGTGGCTCCATCAGCAGTGGTGCGTACGCGTGGAGCTGGATCCGCCAGCACCCAGGGAAGGGCCT |
| | | GGAGTGGATTGGGTACATCTATTACCAGGGGAAGACCTACTACAACCCGTCCCTCAAGAGTCGAGTTACC |
| | | ATATCAGTAGACACGTCTAAGAACCAGTTCTCCCTGAAGCTGAGTTCTGTGACCGCCGCAGACACGGCGG |
| | | TGTACTACTGCGCTAGAGATAAGTACCAAGACTATTCATTCGACATATGGGGTCAGGGTACAATGGTCAC |
| | | CGTCTCCTCA |
| 2035 | BIIB-9-3704 | QVQLQESGPGLVKPSQTLSLTCTVSGGSISSGAYAWSWIRQHPGKGLEWIGYIYYQGKTYYNPSLKSRVT |
| | VH (aa) | ISVDTSKNQFSLKLSSVTAADTAVYYCARDKYQDYSFDIWGQGTMVTVSS |
| 2036 | BIIB-9-3704 | GACATCCAGATGACCCAGTCTCCATCTTCCGTGTCTGCATCTGTAGGAGACAGAGTCACCATCACTTGTC |
| | VL (na) | GGGCGAGTCAGGGTATTGACAGCTGGTTAGCCTGGTATCAGCAGAAACCAGGGAAAGCCCCTAAGCTCCT |
| | | GATCTATGCTGCATCCAGTTTGCAAAGTGGGGTCCCATCAAGGTTCAGCGGCAGTGGATCTGGGACAGAT |
| | | TTCACTCTCACCATCAGCAGCCTGCAGCCTGAAGATTTTGCAACTTATTACTGTCAGCAGGCAAATTTCC |
| | | TCCCTTTCACTTTTGGCGGAGGGACCAAGGTTGAGATCAAA |
| 2037 | BIIB-9-3704 | DIQMTQSPSSVSASVGDRVTITCRASQGIDSWLAWYQQKPGKAPKLLIYAASSLQSGVPSRFSGSGSGTD |
| | VL (aa) | FTLTISSLQPEDFATYYCQQANFLPFTFGGGTKVEIK |

(aa) = amino acid sequence; (nt) = nucleotide sequence

TABLE 7
CDRs of Example 14 daughter antibodies

| | | | | | | |
|---|---|---|---|---|---|---|
| Antibody | VH-CDR1 | VH-CDR2 | VH-CDR3 | VL-CDR1 | VL-CDR2 | VL-CDR3 |

Parent antibody: BIIB-9-484

| | | | | | | |
|---|---|---|---|---|---|---|
| BIIB-9-3595 | 2038 | 2064 | 2090 | 2116 | 2142 | 2168 |
| BIIB-9-3601 | 2039 | 2065 | 2091 | 2117 | 2143 | 2169 |
| BIIB-9-3604 | 2040 | 2066 | 2092 | 2118 | 2144 | 2170 |
| BIIB-9-3617 | 2041 | 2067 | 2093 | 2119 | 2145 | 2171 |
| BIIB-9-3618 | 2042 | 2068 | 2094 | 2120 | 2146 | 2172 |
| BIIB-9-3621 | 2043 | 2069 | 2095 | 2121 | 2147 | 2173 |
| BIIB-9-3647 | 2044 | 2070 | 2096 | 2122 | 2148 | 2174 |
| BIIB-9-3649 | 2045 | 2071 | 2097 | 2123 | 2149 | 2175 |
| BIIB-9-3650 | 2046 | 2072 | 2098 | 2124 | 2150 | 2176 |
| BIIB-9-3654 | 2047 | 2073 | 2099 | 2125 | 2151 | 2177 |

Parent antibody: BIIB-9-1336

| | | | | | | |
|---|---|---|---|---|---|---|
| BIIB-9-3753 | 2048 | 2074 | 2100 | 2126 | 2152 | 2178 |
| BIIB-9-3754 | 2049 | 2075 | 2101 | 2127 | 2153 | 2179 |
| BIIB-9-3756 | 2050 | 2076 | 2102 | 2128 | 2154 | 2180 |
| BIIB-9-3764 | 2051 | 2077 | 2103 | 2129 | 2155 | 2181 |
| BIIB-9-3766 | 2052 | 2078 | 2104 | 2130 | 2156 | 2182 |

Parent antibody: BIIB-9-619

| | | | | | | |
|---|---|---|---|---|---|---|
| BIIB-9-3707 | 2053 | 2079 | 2105 | 2131 | 2157 | 2183 |
| BIIB-9-3709 | 2054 | 2080 | 2106 | 2132 | 2158 | 2184 |
| BIIB-9-3720 | 2055 | 2081 | 2107 | 2133 | 2159 | 2185 |
| BIIB-9-3727 | 2056 | 2082 | 2108 | 2134 | 2160 | 2185 |
| BIIB-9-3745 | 2057 | 2083 | 2109 | 2135 | 2161 | 2187 |

Parent antibody: BIIB-9-578

| | | | | | | |
|---|---|---|---|---|---|---|
| BIIB-9-3780 | 2058 | 2084 | 2110 | 2136 | 2162 | 2188 |
| BIIB-9-3675 | 2059 | 2085 | 2111 | 2137 | 2163 | 2189 |
| BIIB-9-3681 | 2060 | 2086 | 2112 | 2138 | 2164 | 2190 |
| BIIB-9-3684 | 2061 | 2087 | 2113 | 2139 | 2164 | 2191 |
| BIIB-9-3698 | 2062 | 2088 | 2114 | 2140 | 2166 | 2192 |
| BIIB-9-3704 | 2063 | 2089 | 2115 | 2141 | 2167 | 2193 |

1. An isolated antibody, or an antigen binding portion thereof, that specifically binds to activated factor IX (FIXa) (“anti-FIXa antibody or antigen binding portion thereof”), wherein the anti-FIXa antibody or antigen binding portion thereof preferentially binds to FIXa in the presence of FIXa and factor IX zymogen (FIXz) or wherein the anti-FIXa antibody, or antigen binding portion thereof binds to FIXa with a binding affinity higher than a binding affinity of the anti-FIXa antibody or antigen binding portion thereof to FIXz.

2. The anti-FIXa antibody, or antigen binding portion thereof, of claim 1, which cross-competes with or binds to the same epitope as a reference antibody selected from the group consisting of the antibodies in FIG. 3A, FIG. 3B, and FIG. 3C.

3. The anti-FIXa antibody, or antigen binding portion thereof, of claim 3 wherein the epitope comprises chymotrypsinogen numbering amino acid residues H91, H92, N93, H101, D125, K126, E127, Y128, R165, Y177, N178, N179, S232, R233, Y234, V235, N236, W237, E240, and K241 of the sequence of the heavy chain of FIXa, or a combination thereof.

4. The anti-FIXa antibody, or antigen binding portion thereof, of claim 1 which comprises VH CDR1, VH CDR2, and VH CDR3, wherein
(i) the VH CDR1 comprises a VH CDR1 selected from the group consisting of VH CDR1s in FIG. 3A, FIG. 3B, and FIG. 3C, SEQ ID NOs: 2058 to 2063, or the VH CDR1 with one or two mutations; and/or
(ii) the VH CDR2 comprises a VH CDR2 selected from the group consisting of VH CDR2s in FIG. 3A, FIG. 3B, and FIG. 3C, SEQ ID NOs: 2084 to 2089, or the VH CDR2 with one or two mutations; and/or
(iii) the VH CDR3 comprises a VH CDR3 selected from the group consisting of VH CDR3s in FIG. 3A, FIG. 3B, and FIG. 3C, SEQ ID NOs: 2084 to 2089, or the VH CDR3 with one or two mutations; and/or wherein
(iv) the VL CDR1 comprises a VL CDR1 selected from the group consisting of VL CDR1s in FIG. 3A, FIG. 3B, and FIG. 3C, SEQ ID NOs: 2136 to 2141, or the VL CDR1 with one or two mutations; and/or
(v) the VL CDR2 comprises a VL CDR2 selected from the group consisting of VL CDR2s in FIG. 3A, FIG. 3B, and FIG. 3C, SEQ ID NOs: 2162 to 2167, or the VL CDR2 with one or two mutations; and/or
(vi) the VL CDR3 comprises a VL CDR3 selected from the group consisting of VL CDR3s in FIG. 3A, FIG. 3B, and FIG. 3C, SEQ ID NOs: 2188 to 2193, or the VL CDR3 with one or two mutations.

5. The anti-FIXa antibody, or antigen binding portion thereof of claim 1 comprising VH and VL, wherein (a1) VH and VL comprise SEQ ID NOs: 31 and 221, respectively (BIIB-9-484); (a2) VH and VL comprise SEQ ID NOs: 19 and 209, respectively (BIIB-9-440); (a3) VH and VL comprise SEQ ID NOs: 115 and 301, respectively (BIIB-9-882); (a4) VH and VL comprise SEQ ID NOs: 23 and 213, respectively (BIIB-9-460); (a5) VH and VL comprise SEQ ID NOs: 127 and 313, respectively (BIIB-9-433); (a6) VH and VL comprise SEQ ID NOs: 45 and 235, respectively (BIIB-9-619); (a7) VH and VL comprise SEQ ID NOs: 185 and 371, respectively (BIIB-9-578); (a8) VH and VL comprise SEQ ID NOs: 87 and 221, respectively (BIIB-9-1335); or, (a9) VH and VL comprise SEQ ID NOs: 89 and 221, respectively (BIIB-9-1336).

6. An isolated antibody, or an antigen binding portion thereof, that specifically binds to factor X zymogen (FXz) (“anti-FXz antibody or antigen binding portion thereof”), wherein the anti-FXz antibody or antigen binding portion thereof preferentially binds to FXz in the presence of FXz and activated factor X (FXa).

7. The anti-FXz antibody, or antigen binding portion thereof, of claim 6, which cross-competes with or binds to the same epitope as a reference antibody selected from the group consisting of the antibodies in FIG. 12A and FIG. 12B.

8. The anti-FXz antibody, or antigen binding portion thereof, of claim 6, comprising VH and VL, wherein (b1) VH and VL comprise SEQ ID NOs: 423 and 611, respectively (BIIB-12-915); (b2) VH and VL comprise SEQ ID NOs: 427 and 615, respectively (BIIB-12-917); or, (b3) VH and VL comprise SEQ ID NOs: 455 and 643, respectively (BIIB-12-932).

9. An isolated antibody, or an antigen binding portion thereof, that specifically binds to activated factor X (FXa) (“anti-FXa antibody or antigen binding portion thereof”), wherein the anti-FXa antibody or antigen binding portion thereof preferentially binds to FXa in the presence of FXz and FXa and/or binds to FXa with a binding affinity higher than a binding affinity of the antibody or antigen binding portion thereof to FXz.

10. The anti-FXa antibody, or antigen binding portion thereof, of claim 9, which cross-competes with a reference antibody selected from the group consisting of the antibodies in FIG. 12C or binds to the same epitope as a reference antibody selected from the group consisting of the antibodies in FIG. 12C.

11. The anti-FXa antibody, or antigen binding portion thereof, of claim 9, comprising VH and VL, wherein the VH and VL comprise SEQ ID NOs: 559 and 747, respectively (BIIB-12-925).

12. A bispecific molecule comprising the anti-FIX antibody, or antigen binding portion thereof, of claim 1.

13. A nucleic acid encoding the antibody, or antigen binding portion thereof, of claim 1.

14. A pharmaceutical composition comprising the antibody, or antigen binding portion thereof, of claim 1 and a pharmaceutically acceptable carrier.

15. (canceled)

16. A bispecific molecule comprising the anti-FIX antibody, or antigen binding portion thereof, of claim 6.

17. A bispecific molecule comprising the anti-FIX antibody, or antigen binding portion thereof, of claim 9.

18. A nucleic acid encoding the antibody, or antigen binding portion thereof, of claim 6.

19. A nucleic acid encoding the antibody, or antigen binding portion thereof, of claim 9.

20. A pharmaceutical composition comprising the antibody, or antigen binding portion thereof, of claim 6 and a pharmaceutically acceptable carrier.

21. A pharmaceutical composition comprising the antibody, or antigen binding portion thereof, of claim 9 and a pharmaceutically acceptable carrier.

The application's sequence listing, which the Patent Office published only in electronic form, follows.

SEQUENCE LISTING (2207 sequences)

SEQ ID NO: 1 - protein, 119 aa, Artificial sequence
  BIIB-9-605 VH Amino Acid Sequence
EVQLLESGGGLVQPGGSLRLSCAASGFTFSSYAMSWVRQAPGKGLEWVSAISGSGGSTYYADSVKGRFTISRDNSKNTLYLQMNSLRAEDTAVYYCAKKRKYYGSHNPWGQGTLVTVSS

SEQ ID NO: 2 - DNA, 357 bp, Artificial sequence
  BIIB-9-605 VH Nucleic Acid Sequence
gaggtgcagctgttggagtctgggggaggcttggtacagcctggggggtccctgagactctcctgtgcagcctctggattcacctttagcagctatgccatgagctgggtccgccaggctccagggaaggggctggagtgggtctcagctattagtggtagtggtggtagcacatactacgcagactccgtgaagggccggttcaccatctccagagacaattccaagaacacgctgtatctgcaaatgaacagcctgagagccgaggacacggcggtgtactactgcgctaaaaagagaaagtactacggttcacataacccatggggacagggtacattggtcaccgtctcctca

SEQ ID NO: 3 - protein, 122 aa, Artificial sequence
  BIIB-9-475 VH Amino Acid Sequence
QVQLQESGPGLVKPSETLSLTCTVSGGSISSYYWSWIRQPPGKGLEWIGSIYYSGSTNYNPSLKSRVTISVDTSKNQFSLKLSSVTAADTAVYYCARDVGGYDYGVGAFDIWGQGTMVTVSS

SEQ ID NO: 4 - DNA, 366 bp, Artificial sequence
  BIIB-9-475 VH Nucleic Acid Sequence
caggtgcagctgcaggagtcgggcccaggactggtgaagccttcggagaccctgtccctcacctgcactgtctctggtggctccatcagtagttactactggagctggatccggcagcccccagggaagggactggagtggattgggtcaatctattacagtgggagcaccaactacaacccctccctcaagagtcgagtcaccatatcagtagacacgtccaagaaccagttctccctgaagctgagttctgtgaccgccgcagacacggcggtgtactactgcgccagagatgtgggcggatacgactacggagtgggagccttcgacatatggggtcagggtacaatggtcaccgtctcctca

SEQ ID NO: 5 - protein, 120 aa, Artificial sequence
  BIIB-9-477 VH Amino Acid Sequence
EVQLLESGGGLVQPGGSLRLSCAASGFTFSNYAMSWVRQAPGKGLEWVSAISGSGGSTYYADSVKGRFTISRDNSKNTLYLQMNSLRAEDTAVYYCARGGVYSSSWMRFWGQGTLVTVSS

SEQ ID NO: 6 - DNA, 360 bp, Artificial sequence
  BIIB-9-477 VH Nucleic Acid Sequence
gaggtgcagctgttggagtctgggggaggcttggtacagcctggggggtccctgagactctcctgtgcagcctctggattcacctttagcaattatgccatgagctgggtccgccaggctccagggaaggggctggagtgggtctcagctattagtggtagtggtggtagcacatactacgcagactccgtgaagggccggttcaccatctccagagacaattccaagaacacgctgtatctgcaaatgaacagcctgagagccgaggacacggcggtgtactactgcgccagaggtggcgtgtacagcagctcgtggatgagattctggggacagggtacattggtcaccgtctcctca

SEQ ID NO: 7 - protein, 119 aa, Artificial sequence
  BIIB-9-479 VH Amino Acid Sequence
QVQLQESGPGLVKPSETLSLTCTVSGGSISSYYWSWIRQPPGKGLEWIGSIYYSGSTNYNPSLKSRVTISVDTSKNQFSLKLSSVTAADTAVYYCAREHYGDYPLFDIWGQGTMVTVSS

SEQ ID NO: 8 - DNA, 357 bp, Artificial sequence
  BIIB-9-479 VH Nucleic Acid Sequence
caggtgcagctgcaggagtcgggcccaggactggtgaagccttcggagaccctgtccctcacctgcactgtctctggtggctccatcagtagttactactggagctggatccggcagcccccagggaagggactggagtggattgggtcaatctattacagtgggagcaccaactacaacccctccctcaagagtcgagtcaccatatcagtagacacgtccaagaaccagttctccctgaagctgagttctgtgaccgccgcagacacggcggtgtactactgcgccagagagcactacggagactacccactattcgacatatggggtcagggtacaatggtcaccgtctcctca

SEQ ID NO: 9 - protein, 119 aa, Artificial sequence
  BIIB-9-480 VH Amino Acid Sequence
QVQLQESGPGLVKPSETLSLTCAVSGYSISSGYYWGWIRQPPGKGLEWIGSSYHSGSTYYNPSLKSRVTISVDTSKNQFSLKLSSVTAADTAVYYCARDQQDYGAFDIWGQGTMVTVSS

SEQ ID NO: 10 - DNA, 357 bp, Artificial sequence
  BIIB-9-480 VH Nucleic Acid Sequence
caggtgcagctgcaggagtcgggcccaggactggtgaagccttcggagaccctgtccctcacctgcgctgtctctggttactccatcagcagtggttactactggggctggatccggcagcccccagggaaggggctggagtggattgggagttcctatcatagtgggagcacctactacaacccgtccctcaagagtcgagtcaccatatcagtagacacgtccaagaaccagttctccctgaagctgagttctgtgaccgccgcagacacggcggtgtactactgcgccagggaccagcaagactacggggccttcgacatatggggtcagggtacaatggtcaccgtctcctca

SEQ ID NO: 11 - protein, 120 aa, Artificial sequence
  BIIB-9-558 VH Amino Acid Sequence
EVQLVESGGGLVKPGGSLRLSCAASGFTFSSYSMNWVRQAPGKGLEWVSSISSSSSYIYYADSVKGRFTISRDNAKNSLYLQMNSLRAEDTAVYYCARSYGYGYHDFDLWGRGTLVTVSS

SEQ ID NO: 12 - DNA, 360 bp, Artificial sequence
  BIIB-9-558 VH Nucleic Acid Sequence
gaggtgcagctggtggagtctgggggaggcctggtcaagcctggggggtccctgagactctcctgtgcagcctctggattcaccttcagtagctatagcatgaactgggtccgccaggctccagggaaggggctggagtgggtctcatccattagtagtagtagtagttacatatactacgcagactcagtgaagggccgattcaccatctccagagacaacgccaagaactcactgtatctgcaaatgaacagcctgagagccgaggacacggcggtgtactactgcgccagatcttacggatacggataccacgacttcgacctatgggggagaggtaccttggtcaccgtctcctca

SEQ ID NO: 13 - protein, 121 aa, Artificial sequence
  BIIB-9-414 VH Amino Acid Sequence
QVQLVQSGAEVKKPGASVKVSCKASGYTFTSYYMHWVRQAPGQGLEWMGIINPSGGSTSYAQKFQGRVTMTRDTSTSTVYMELSSLRSEDTAVYYCARDPYSYGMYYFDYWGQGTLVTVSS

SEQ ID NO: 14 - DNA, 363 bp, Artificial sequence
  BIIB-9-414 VH Nucleic Acid Sequence
caggtgcagctggtgcagtctggggctgaggtgaagaagcctggggcctcagtgaaggtttcctgcaaggcatctggatacaccttcaccagctactatatgcactgggtgcgacaggcccctggacaagggcttgagtggatgggaataatcaaccctagtggtggtagcacaagctacgcacagaagttccagggcagagtcaccatgaccagggacacgtccacgagcacagtctacatggagctgagcagcctgagatctgaggacacggcggtgtactactgcgccagagacccttactcctacggaatgtattactttgattactggggacagggtacattggtcaccgtctcctca

SEQ ID NO: 15 - protein, 120 aa, Artificial sequence
  BIIB-9-415 VH Amino Acid Sequence
QVQLVQSGAEVKKPGASVKVSCKASGYTFTSYYMHWVRQAPGQGLEWMGIINPSGGSTSYAQKFQGRVTMTRDTSTSTVYMELSSLRSEDTAVYYCARDGLSSGYYWDNWGQGTLVTVSS

SEQ ID NO: 16 - DNA, 360 bp, Artificial sequence
  BIIB-9-415 VH Nucleic Acid Sequence
caggtgcagctggtgcagtctggggctgaggtgaagaagcctggggcctcagtgaaggtttcctgcaaggcatctggatacaccttcaccagctactatatgcactgggtgcgacaggcccctggacaagggcttgagtggatgggaataatcaaccctagtggtggtagcacaagctacgcacagaagttccagggcagagtcaccatgaccagggacacgtccacgagcacagtctacatggagctgagcagcctgagatctgaggacacggcggtgtactactgcgccagagatgggttgagcagcggatactactgggataattggggacagggtacattggtcaccgtctcctca

SEQ ID NO: 17 - protein, 118 aa, Artificial sequence
  BIIB-9-425 VH Amino Acid Sequence
QVQLVQSGAEVKKPGASVKVSCKASGYTFTSYYMHWVRQAPGQGLEWMGIINPSGGSTSYAQKFQGRVTMTRDTSTSTVYMELSSLRSEDTAVYYCAREPTWDVAYDYWGQGTLVTVS

SEQ ID NO: 18 - DNA, 357 bp, Artificial sequence
  BIIB-9-425 VH Nucleic Acid Sequence
caggtgcagctggtgcagtctggggctgaggtgaagaagcctggggcctcagtgaaggtttcctgcaaggcatctggatacaccttcaccagctactatatgcactgggtgcgacaggcccctggacaagggcttgagtggatgggaataatcaaccctagtggtggtagcacaagctacgcacagaagttccagggcagagtcaccatgaccagggacacgtccacgagcacagtctacatggagctgagcagcctgagatctgaggacacggcggtgtactactgcgccagagagcctacctgggacgtcgcctacgattattggggacagggtacattggtcaccgtctcctca

SEQ ID NO: 19 - protein, 124 aa, Artificial sequence
  BIIB-9-440 VH Amino Acid Sequence
QLQLQESGPGLVKPSETLSLTCTVSGGSISSSDYYWGWIRQPPGKGLEWIGSIYYSGSTYYNPSLKSRVTISVDTSKNQFSLKLSSVTAADTAVYYCARSPRHKVRGPNWFDPWGQGTLVTVSS

SEQ ID NO: 20 - DNA, 372 bp, Artificial sequence
  BIIB-9-440 VH Nucleic Acid Sequence
cagctgcagctgcaggagtcgggcccaggactggtgaagccttcggagaccctgtccctcacctgcactgtctctggtggctccatcagcagtagtgactactactggggctggatccgccagcccccagggaaggggctggagtggattgggagtatctattatagtgggagcacctactacaacccgtccctcaagagtcgagtcaccatatccgtagacacgtccaagaaccagttctccctgaagctgagttctgtgaccgccgcagacacggcggtgtactactgcgccagatcacctaggcacaaagtgcgtggccccaattggtttgatccatggggacagggtacattggtcaccgtctcctca

SEQ ID NO: 21 - protein, 119 aa, Artificial sequence
  BIIB-9-452 VH Amino Acid Sequence
QVQLVQSGAEVKKPGASVKVSCKASGYTFTSYYMHWVRQAPGQGLEWMGIINPSGGSTSYAQKFQGRVTMTRDTSTSTVYMELSSLRSEDTAVYYCARDGRLSYTWDRWGQGTLVTVSS

SEQ ID NO: 22 - DNA, 357 bp, Artificial sequence
  BIIB-9-452 VH Nucleic Acid Sequence
caggtgcagctggtgcagtctggggctgaggtgaagaagcctggggcctcagtgaaggtttcctgcaaggcatctggatacaccttcaccagctactatatgcactgggtgcgacaggcccctggacaagggcttgagtggatgggaataatcaaccctagtggtggtagcacaagctacgcacagaagttccagggcagagtcaccatgaccagggacacgtccacgagcacagtctacatggagctgagcagcctgagatctgaggacacggcggtgtactactgcgccagagacggcagactaagctacacctgggacagatggggacagggtacattggtcaccgtctcctca

SEQ ID NO: 23 - protein, 125 aa, Artificial sequence
  BIIB-9-460 VH Amino Acid Sequence
QVQLVQSGAEVKKPGASVKVSCKASGYTFTSYYMHWVRQAPGQGLEWMGIINPSGGSTSYAQKFQGRVTMTRDTSTSTVYMELSSLRSEDTAVYYCARDISTDGESSLYYYMDVWGKGTTVTVSS

SEQ ID NO: 24 - DNA, 375 bp, Artificial sequence
  BIIB-9-460 VH Nucleic Acid Sequence
caggtgcagctggtgcagtctggggctgaggtgaagaagcctggggcctcagtgaaggtttcctgcaaggcatctggatacaccttcaccagctactatatgcactgggtgcgacaggcccctggacaagggcttgagtggatgggaataatcaaccctagtggtggtagcacaagctacgcacagaagttccagggcagagtcaccatgaccagggacacgtccacgagcacagtctacatggagctgagcagcctgagatctgaggacacggcggtgtactactgcgcaagggatatttctaccgacggggaatcatcactttactactacatggacgtatggggcaagggtacaactgtcaccgtctcctca

SEQ ID NO: 25 - protein, 122 aa, Artificial sequence
  BIIB-9-461 VH Amino Acid Sequence
QVQLVQSGAEVKKPGASVKVSCKASGYTFTSYYMHWVRQAPGQGLEWMGIINPSGGSTSYAQKFQGRVTMTRDTSTSTVYMELSSLRSEDTAVYYCARGPTDSSGYLDMDVWGKGTTVTVSS

SEQ ID NO: 26 - DNA, 366 bp, Artificial sequence
  BIIB-9-461 VH Nucleic Acid Sequence
caggtgcagctggtgcagtctggggctgaggtgaagaagcctggggcctcagtgaaggtttcctgcaaggcatctggatacaccttcaccagctactatatgcactgggtgcgacaggcccctggacaagggcttgagtggatgggaataatcaaccctagtggtggtagcacaagctacgcacagaagttccagggcagagtcaccatgaccagggacacgtccacgagcacagtctacatggagctgagcagcctgagatctgaggacacggcggtgtactactgcgccagaggacccactgacagcagcggatacttggacatggacgtatggggcaagggtacaactgtcaccgtctcctca

SEQ ID NO: 27 - protein, 119 aa, Artificial sequence
  BIIB-9-465 VH Amino Acid Sequence
QVQLVQSGAEVKKPGASVKVSCKASGYTFTSYYMVWVRQAPGQGLEWMGIINPSGGSTSYAQKFQGRVTMTRDTSTSTVYMELSSLRSEDTAVYYCARSPTDGYYFDLWGRGTLVTVSS

SEQ ID NO: 28 - DNA, 357 bp, Artificial sequence
  BIIB-9-465 VH Nucleic Acid Sequence
caggtgcagctggtgcagtctggggctgaggtgaagaagcctggggcctcagtgaaggtttcctgcaaggcatctggatacaccttcaccagctactatatggtctgggtgcgacaggcccctggacaagggcttgagtggatgggaataatcaaccctagtggtggtagcacaagctacgcacagaagttccagggcagagtcaccatgaccagggacacgtccacgagcacagtctacatggagctgagcagcctgagatctgaggacacggcggtgtactactgcgccagatcacctacggacggatactatttcgacctatgggggagaggtaccttggtcaccgtctcctca

SEQ ID NO: 29 - protein, 120 aa, Artificial sequence
  BIB-4-564 VH Amino Acid Sequence
QVQLQESGPGLVKPSETLSLTCAVSGYSISSGYYWAWIRQPPGKGLEWIGSIYHSGSTYYNPSLKSRVTISVDTSKNQFSLKLSSVTAADTAVYYCARDPGYSWEYFDYWGQGTLVTVSS

SEQ ID NO: 30 - DNA, 360 bp, Artificial sequence
  BIIB-9-564 VH Nucleic Acid Sequence
caggtgcagctgcaggagtcgggcccaggactggtgaagccttcggagaccctgtccctcacctgcgctgtctctggttactccatcagcagtggttactactgggcttggatccggcagcccccagggaaggggctggagtggattgggagtatctatcatagtgggagcacctactacaacccgtccctcaagagtcgagtcaccatatcagtagacacgtccaagaaccagttctccctgaagctgagttctgtgaccgccgcagacacggcggtgtactactgcgccagagatccaggatacagctgggagtactttgactactggggacagggtacattggtcaccgtctcctca

SEQ ID NO: 31 - protein, 122 aa, Artificial sequence
  BIIB-9-484 VH Amino Acid Sequence
EVQLVESGGGLVKPGGSLRLSCAASGFTFSSYSMNWVRQAPGKGLEWVSSISSSSSYIYYADSVKGRFTISRDNAKNSLYLQMNSLRAEDTAVYYCARDVGGYAGYYGMDVWGQGTTVTVSS

SEQ ID NO: 32 - DNA, 366 bp, Artificial sequence
  BIIB-9-484 VH Nucleic Acid Sequence
gaggtgcagctggtggagtctgggggaggcctggtcaagcctggggggtccctgagactctcctgtgcagcctctggattcaccttcagtagctatagcatgaactgggtccgccaggctccagggaaggggctggagtgggtctcatccattagtagtagtagtagttacatatactacgcagactcagtgaagggccgattcaccatctccagagacaacgccaagaactcactgtatctgcaaatgaacagcctgagagccgaggacacggcggtgtactactgcgccagagatgtaggaggatacgcagggtactacggcatggatgtatggggccagggaacaactgtcaccgtctcctca

SEQ ID NO: 33 - protein, 121 aa, Artificial sequence
  BIIB-9-469 VH Amino Acid Sequence
QVQLVQSGAEVKKPGASVKVSCKASGYTFTSYYMHWVRQAPGQGLEWMGIINPSGGSTSYAQKFQGRVTMTRDTSTSTVYMELSSLRSEDTAVYYCARDLGYGRSYDFDLWGRGTLVTVSS

SEQ ID NO: 34 - DNA, 363 bp, Artificial sequence
  BIIB-9-469 VH Nucleic Acid Sequence
caggtgcagctggtgcagtctggggctgaggtgaagaagcctggggcctcagtgaaggtttcctgcaaggcatctggatacaccttcaccagctactatatgcactgggtgcgacaggcccctggacaagggcttgagtggatgggaataatcaaccctagtggtggtagcacaagctacgcacagaagttccagggcagagtcaccatgaccagggacacgtccacgagcacagtctacatggagctgagcagcctgagatctgaggacacggcggtgtactactgcgccagagacttgggatacggcagaagttatgacttcgacctatgggggagaggtaccttggtcaccgtctcctca

SEQ ID NO: 35 - protein, 122 aa, Artificial sequence
  BIIB-9-566 VH Amino Acid Sequence
QVQLVQSGAEVKKPGASVKVSCKASGYTFTSYYMVWVRQAPGQGLEWMGIINPSGGSTSYAQKFQGRVTMTRDTSTSTVYMELSSLRSEDTAVYYCARVPTYRYSYLAFDIWGQGTMVTVSS

SEQ ID NO: 36 - DNA, 366 bp, Artificial sequence
  BIIB-9-566 VH Nucleic Acid Sequence
caggtgcagctggtgcagtctggggctgaggtgaagaagcctggggcctcagtgaaggtttcctgcaaggcatctggatacaccttcaccagctactatatggtctgggtgcgacaggcccctggacaagggcttgagtggatgggaataatcaaccctagtggtggtagcacaagctacgcacagaagttccagggcagagtcaccatgaccagggacacgtccacgagcacagtctacatggagctgagcagcctgagatctgaggacacggcggtgtactactgcgccagagtccctacatacagatacagctacttagccttcgatatctggggtcagggtacaatggtcaccgtctcctca

SEQ ID NO: 37 - protein, 122 aa, Artificial sequence
  BIIB-9-567 VH Amino Acid Sequence
QVQLVQSGAEVKKPGASVKVSCKASGYTFTSYYMHWVRQAPGQGLEWMGIINPSGGSTSYAQKFQGRVTMTRDTSTSTVYMELSSLRSEDTAVYYCARLGRRYYAYDGMDVWGQGTTVTVSS

SEQ ID NO: 38 - DNA, 366 bp, Artificial sequence
  BIIB-9-567 VH Nucleic Acid Sequence
caggtgcagctggtgcagtctggggctgaggtgaagaagcctggggcctcagtgaaggtttcctgcaaggcatctggatacaccttcaccagctactatatgcactgggtgcgacaggcccctggacaagggcttgagtggatgggaataatcaaccctagtggtggtagcacaagctacgcacagaagttccagggcagagtcaccatgaccagggacacgtccacgagcacagtctacatggagctgagcagcctgagatctgaggacacggcggtgtactactgcgccagattgggaagaaggtactacgcctatgatgggatggatgtttggggccagggaacaactgtcaccgtctcctca

SEQ ID NO: 39 - protein, 121 aa, Artificial sequence
  BIIB-9-569 VH Amino Acid Sequence
QVQLVQSGAEVKKPGASVKVSCKASGYTFTSYYMHWVRQAPGQGLEWMGIINPSGGSTSYAQKFQGRVTMTRDTSTSTVYMELSSLRSEDTAVYYCARDGSGYSPYSFDPWGQGTLVTVSS

SEQ ID NO: 40 - DNA, 363 bp, Artificial sequence
  BIIB-9-569 VH Nucleic Acid Sequence
caggtgcagctggtgcagtctggggctgaggtgaagaagcctggggcctcagtgaaggtttcctgcaaggcatctggatacaccttcaccagctactatatgcactgggtgcgacaggcccctggacaagggcttgagtggatgggaataatcaaccctagtggtggtagcacaagctacgcacagaagttccagggcagagtcaccatgaccagggacacgtccacgagcacagtctacatggagctgagcagcctgagatctgaggacacggcggtgtactactgcgccagagacggatctggatacagtccatacagcttcgacccatggggacagggtacattggtcaccgtctcctca

SEQ ID NO: 41 - protein, 125 aa, Artificial sequence
  BIIB-9-588 VH Amino Acid Sequence
QVQLVQSGAEVKKPGASVKVSCKASGYTFTSYYMHWVRQAPGQGLEWMGIINPSGGSTTYAQKFQGRVTMTRDTSTSTVYMELSSLRSEDTAVYYCARDGGGSYDYWSGYWYDVWGQGTTVTVSS

SEQ ID NO: 42 - DNA, 375 bp, Artificial sequence
  BIIB-9-588 VH Nucleic Acid Sequence
caggtgcagctggtgcagtctggggctgaggtgaagaagcctggggcctcagtgaaggtttcctgcaaggcatctggatacaccttcaccagctactatatgcactgggtgcgacaggcccctggacaagggcttgagtggatgggaataatcaaccctagtggtggtagcacaacctacgcacagaagttccagggcagagtcaccatgaccagggacacgtccacgagcacagtctacatggagctgagcagcctgagatctgaggacacggcggtgtactactgcgccagagatggtggcggatcctacgactactggagcggatactggtacgacgtatggggtcagggtacaactgtcaccgtctcctca

SEQ ID NO: 43 - protein, 120 aa, Artificial sequence
  BIIB-9-611 VH Amino Acid Sequence
QVQLVQSGAEVKKPGASVKVSCKASGYTFTSYYMHWVRQAPGQGLEWMGIINPSGGSTSYAQKFQGRVTMTRDTSTSTVYMELSSLRSEDTAVYYCAREVISRVSYFDLWGRGTLVTVSS

SEQ ID NO: 44 - DNA, 360 bp, Artificial sequence
  BIIB-9-611 VH Nucleic Acid Sequence
caggtgcagctggtgcagtctggggctgaggtgaagaagcctggggcctcagtgaaggtttcctgcaaggcatctggatacaccttcaccagctactatatgcactgggtgcgacaggcccctggacaagggcttgagtggatgggaataatcaaccctagtggtggtagcacaagctacgcacagaagttccagggcagagtcaccatgaccagggacacgtccacgagcacagtctacatggagctgagcagcctgagatctgaggacacggcggtgtactactgcgccagagaggtgatatccagggttagctacttcgacctatgggggagaggtaccttggtcaccgtctcctca

SEQ ID NO: 45 - protein, 121 aa, Artificial sequence
  BIIB-9-619 VH Amino Acid Sequence
QVQLVQSGAEVKKPGASVKVSCKASGYTFTSYYMHWVRQAPGQGLEWMGIINPSGGSTSYAQKFQGRVTMTRDTSTSTVYMELSSLRSEDTAVYYCARDGPRVSDYYMDVWGKGTTVTVSS

SEQ ID NO: 46 - DNA, 363 bp, Artificial sequence
  BIIB-9-619 VH Nucleic Acid Sequence
caggtgcagctggtgcagtctggggctgaggtgaagaagcctggggcctcagtgaaggtttcctgcaaggcatctggatacaccttcaccagctactatatgcactgggtgcgacaggcccctggacaagggcttgagtggatgggaataatcaaccctagtggtggtagcacaagctacgcacagaagttccagggcagagtcaccatgaccagggacacgtccacgagcacagtctacatggagctgagcagcctgagatctgaggacacggcggtgtactactgcgccagagacggaccaagagtcagtgactactacatggacgtatggggcaagggtacaactgtcaccgtctcctca

SEQ ID NO: 47 - protein, 120 aa, Artificial sequence
  BIIB-9-626 VH Amino Acid Sequence
QVQLVQSGAEVKKPGASVKVSCKASGYTFTSYYMHWVRQAPGQGLEWMGVINPSGGSTSYAQKFQGRVTMTRDTSTSTVYMELSSLRSEDTAVYYCARDLQYSMTYFDYWGQGTLVTVSS

SEQ ID NO: 48 - DNA, 360 bp, Artificial sequence
  BIIB-9-626 VH Nucleic Acid Sequence
caggtgcagctggtgcagtctggggctgaggtgaagaagcctggggcctcagtgaaggtttcctgcaaggcatctggatacaccttcaccagctactatatgcactgggtgcgacaggcccctggacaagggcttgagtggatgggagtcatcaaccctagtggtggtagcacaagctacgcacagaagttccagggcagagtcaccatgaccagggacacgtccacgagcacagtctacatggagctgagcagcctgagatctgaggacacggcggtgtactactgcgccagagacttgcagtatagcatgacatacttcgactactggggacagggtacattggtcaccgtctcctca

SEQ ID NO: 49 - protein, 119 aa, Artificial sequence; identical to SEQ ID NO: 21
  BIIB-9-883 VH Amino Acid Sequence

SEQ ID NO: 50 - DNA, 357 bp, Artificial sequence; identical to SEQ ID NO: 22
  BIIB-9-883 VH Nucleic Acid Sequence

SEQ ID NO: 51 - protein, 119 aa, Artificial sequence
  BIIB-9-419 VH Amino Acid Sequence
QVQLVQSGAEVKKPGASVKVSCKASGYTFTSYYMHWVRQAPGQGLEWMGIINPSGGSTSYAQKFQGRVTMTRDTSTSTVYMELSSLRSEDTAVYYCAREPTFYASYFDLWGRGTLVTVS

SEQ ID NO: 52 - DNA, 360 bp, Artificial sequence
  BIIB-9-419 VH Nucleic Acid Sequence
caggtgcagctggtgcagtctggggctgaggtgaagaagcctggggcctcagtgaaggtttcctgcaaggcatctggatacaccttcaccagctactatatgcactgggtgcgacaggcccctggacaagggcttgagtggatgggaataatcaaccctagtggtggtagcacaagctacgcacagaagttccagggcagagtcaccatgaccagggacacgtccacgagcacagtctacatggagctgagcagcctgagatctgaggacacggcggtgtactactgcgccagagagcctaccttctacgccagctacttcgacctatgggggagaggtaccttggtcaccgtctcctca

SEQ ID NO: 53 - protein, 122 aa, Artificial sequence
  BIIB-9-451 VH Amino Acid Sequence
QLQLQESGPGLVKPSETLSLTCTVSGGSISSSSYYWGWIRQPPGKGLEWIGSISYSGSTYYNPSLKSRVTISVDTSKNQFSLKLSSVTAADTAVYYCARDSGGYYYQGFDYWGQGTLVTVSS

SEQ ID NO: 54 - DNA, 366 bp, Artificial sequence
  BIIB-9-451 VH Nucleic Acid Sequence
cagctgcagctgcaggagtcgggcccaggactggtgaagccttcggagaccctgtccctcacctgcactgtctctggtggctccatcagcagtagtagttactactggggctggatccgccagcccccagggaaggggctggagtggattgggagtatctcctatagtgggagcacctactacaacccgtccctcaagagtcgagtcaccatatccgtagacacgtccaagaaccagttctccctgaagctgagttctgtgaccgccgcagacacggcggtgtactactgcgccagagactcaggaggatactactaccagggattcgattactggggacagggtacattggtcaccgtctcctca

SEQ ID NO: 55 - protein, 122 aa, Artificial sequence
  BIIB-9-473 VH Amino Acid Sequence
VQLLESGGGLVQPGGSLRLSCAASGFTFSSYAMSWVRQAPGKGLEWVSAISGSGGSTYYADSVKGRFTISRDNSKNTLYLQMNSLRAEDTAVYYCAKDRLRYSRWYDGMDVWGQGTTVTVSS

SEQ ID NO: 56 - DNA, 369 bp, Artificial sequence
  BIIB-9-473 VH Nucleic Acid Sequence
gaggtgcagctgttggagtctgggggaggcttggtacagcctggggggtccctgagactctcctgtgcagcctctggattcacctttagcagctatgccatgagctgggtccgccaggctccagggaaggggctggagtgggtctcagctattagtggtagtggtggtagcacatactacgcagactccgtgaagggccggttcaccatctccagagacaattccaagaacacgctgtatctgcaaatgaacagcctgagagccgaggacacggcggtgtactactgcgcaaaagacaggttgagatacagcagatggtacgatgggatggatgtttggggccagggaacaactgtcaccgtctcctca

SEQ ID NO: 57 - protein, 123 aa, Artificial sequence
  BIIB-9-565 VH Amino Acid Sequence
QLQLQESGPGLVKPSETLSLTCTVSGGSISSSSYYWGWIRQPPGKGLEWIGSIYYSGSTYYNPSLKSRVTISVDTSKNQFSLKLSSVTAADTAVYYCARAGMYSSYANWFDPWGQGTLVTVSS

SEQ ID NO: 58 - DNA, 368 bp, Artificial sequence
  BIIB-9-565 VH Nucleic Acid Sequence
cagctgcagctgcaggagtcgggcccaggactggtgaagccttcggagaccctgtccctcacctgcactgtctctggtggctccatcagcagtagtagttactactggggctggatccgccagcccccagggaaggggctggagtggattgggagtatctattatagtgggagcacctactacaacccgtccctcaagagtcgagtcaccatatccgtagacacgtccaagaaccagttctccctgaagctgagttctgtgaccgccgcagacacggcggtgtactactgcgccagagctggaatgtactccagttatgctaactggtttgacccatggggacagggtacattggtcaccgtctcctc

SEQ ID NO: 59 - protein, 120 aa, Artificial sequence
  BIIB-9-573 VH Amino Acid Sequence
QLQLQESGPGLVKPSETLSLTCTVSGGSISSSSYYWGWIRQPPGKGLEWIGSIYYSGSTYYNPSLKSRVTISVDTSKNQFSLKLSSVTAADTAVYYCARESKTKGYLDLWGRGTLVTVSS

SEQ ID NO: 60 - DNA, 360 bp, Artificial sequence
  BIIB-9-573 VH Nucleic Acid Sequence
cagctgcagctgcaggagtcgggcccaggactggtgaagccttcggagaccctgtccctcacctgcactgtctctggtggctccatcagcagtagtagttactactggggctggatccgccagcccccagggaaggggctggagtggattgggagtatctattatagtgggagcacctactacaacccgtccctcaagagtcgagtcaccatatccgtagacacgtccaagaaccagttctccctgaagctgagttctgtgaccgccgcagacacggcggtgtactactgcgccagagaatctaagaccaaagggtacttagacctatgggggagaggtaccttggtcaccgtctcctca

SEQ ID NO: 61 - protein, 120 aa, Artificial sequence
  BIIB-9-579 VH Amino Acid Sequence
QVQLVQSGAEVKKPGASVKVSCKASGYTFTSYYMVWVRQAPGQGLEWMGIINPSGGSTSYAQKFQGRVTMTRDTSTSTVYMELSSLRSEDTAVYYCARGPWYSYYYMDVWGKGTTVTVSS

SEQ ID NO: 62 - DNA, 360 bp, Artificial sequence
  BIIB-9-579 VH Nucleic Acid Sequence
caggtgcagctggtgcagtctggggctgaggtgaagaagcctggggcctcagtgaaggtttcctgcaaggcatctggatacaccttcaccagctactatatggtctgggtgcgacaggcccctggacaagggcttgagtggatgggaataatcaaccctagtggtggtagcacaagctacgcacagaagttccagggcagagtcaccatgaccagggacacgtccacgagcacagtctacatggagctgagcagcctgagatctgaggacacggcggtgtactactgcgccagagggccttggtacagttattactacatggacgtatggggcaagggtacaactgtcaccgtctcctca

SEQ ID NO: 63 - protein, 122 aa, Artificial sequence
  BIIB-9-581 VH Amino Acid Sequence
QVQLVQSGAEVKKPGASVKVSCKASGYTFTSYYMHWVRQAPGQGLEWMGIINPSGGSTSYAQKFQGRVTMTRDTSTSTVYMELSSLRSEDTAVYYCARDPLYYREGYVFDYWGQGTLVTVSS

SEQ ID NO: 64 - DNA, 366 bp, Artificial sequence
  BIIB-9-581 VH Nucleic Acid Sequence
caggtgcagctggtgcagtctggggctgaggtgaagaagcctggggcctcagtgaaggtttcctgcaaggcatctggatacaccttcaccagctactatatgcactgggtgcgacaggcccctggacaagggcttgagtggatgggaataatcaaccctagtggtggtagcacaagctacgcacagaagttccagggcagagtcaccatgaccagggacacgtccacgagcacagtctacatggagctgagcagcctgagatctgaggacacggcggtgtactactgcgccagagatcctttgtactacagagaaggatacgttttcgattactggggacagggtacattggtcaccgtctcctca

SEQ ID NO: 65 - protein, 121 aa, Artificial sequence
  BIIB-9-582 VH Amino Acid Sequence
QVQLVQSGAEVKKPGASVKVSCKASGYTFTSYYMVWVRQAPGQGLEWMGIINPSGGSTSYAQKFQGRVTMTRDTSTSTVYMELSSLRSEDTAVYYCARAPTYFYSYGMDVWGQGTTVTVSS

SEQ ID NO: 66 - DNA, 363 bp, Artificial sequence
  BIIB-9-582 VH Nucleic Acid Sequence
caggtgcagctggtgcagtctggggctgaggtgaagaagcctggggcctcagtgaaggtttcctgcaaggcatctggatacaccttcaccagctactatatggtctgggtgcgacaggcccctggacaagggcttgagtggatgggaataatcaaccctagtggtggtagcacaagctacgcacagaagttccagggcagagtcaccatgaccagggacacgtccacgagcacagtctacatggagctgagcagcctgagatctgaggacacggcggtgtactactgcgccagagcccctacatacttctacagctacggaatggacgtatggggccagggaacaactgtcaccgtctcctca

SEQ ID NO: 67 - protein, 125 aa, Artificial sequence
  BIIB-9-585 VH Amino Acid Sequence
QLQLQESGPGLVKPSETLSLTCTVSGGSISSSDYYWGWIRQPPGKGLEWIGSIYYSGSTYYNPSLKSRVTISVDTSKNQFSLKLSSVTAADTAVYYCAREVGTYYYGLDFWFDPWGQGTLVTVSS

SEQ ID NO: 68 - DNA, 375 bp, Artificial sequence
  BIIB-9-585 VH Nucleic Acid Sequence
cagctgcagctgcaggagtcgggcccaggactggtgaagccttcggagaccctgtccctcacctgcactgtctctggtggctccatcagcagtagtgactactactggggctggatccgccagcccccagggaaggggctggagtggattgggagtatctattatagtgggagcacctactacaacccgtccctcaagagtcgagtcaccatatccgtagacacgtccaagaaccagttctccctgaagctgagttctgtgaccgccgcagacacggcggtgtactactgcgccagagaagtcggaacatactactacggcttagacttctggtttgacccctggggacagggtacattggtcaccgtctcctca

SEQ ID NO: 69 - protein, 120 aa, Artificial sequence
  BIIB-9-587 VH Amino Acid Sequence
QVQLVQSGAEVKKPGASVKVSCKASGYTFTSYYMHWVRQAPGQGLEWMGIINPSGGSTSYAQKFQGRVTMTRDTSTSTVYMELSSLRSEDTAVYYCARGPPGYEYYMDVWGKGTTVTVSS

SEQ ID NO: 70 - DNA, 360 bp, Artificial sequence
  BIIB-9-587 VH Nucleic Acid Sequence
caggtgcagctggtgcagtctggggctgaggtgaagaagcctggggcctcagtgaaggtttcctgcaaggcatctggatacaccttcaccagctactatatgcactgggtgcgacaggcccctggacaagggcttgagtggatgggaataatcaaccctagtggtggtagcacaagctacgcacagaagttccagggcagagtcaccatgaccagggacacgtccacgagcacagtctacatggagctgagcagcctgagatctgaggacacggcggtgtactactgcgccagaggaccgcctggatacgagtactacatggacgtatggggcaagggaacaactgtcaccgtctcctca

SEQ ID NO: 71 - protein, 120 aa, Artificial sequence
  BIIB-9-590 VH Amino Acid Sequence
QVQLVQSGAEVKKPGASVKVSCKASGYTFTSYYMHWVRQAPGQGLEWMGIINPSGGSTSYAQKFQGRVTMTRDTSTSTVYMELSSLRSEDTAVYYCARDQEWAYYGMDVWGQGTTVTVSS

SEQ ID NO: 72 - DNA, 360 bp, Artificial sequence
  BIIB-9-590 VH Nucleic Acid Sequence
caggtgcagctggtgcagtctggggctgaggtgaagaagcctggggcctcagtgaaggtttcctgcaaggcatctggatacaccttcaccagctactatatgcactgggtgcgacaggcccctggacaagggcttgagtggatgggaataatcaaccctagtggtggtagcacaagctacgcacagaagttccagggcagagtcaccatgaccagggacacgtccacgagcacagtctacatggagctgagcagcctgagatctgaggacacggcggtgtactactgcgccagagaccaggagtgggcctactacggcatggacgtatggggccagggaacaactgtcaccgtctcctca

SEQ ID NO: 73 - protein, 128 aa, Artificial sequence
  BIIB-9-592 VH Amino Acid Sequence
QLQLQESGPGLVKPSETLSLTCTVSGGSISSNSYYWGWIRQPPGKGLEWIGSIYYSGSTYYNPSLKSRVTISVDTSKNQFSLKLSSVTAADTAVYYCARDSNYDSSGYALYYYGMDVWGQGTTVTVSS

SEQ ID NO: 74 - DNA, 384 bp, Artificial sequence
  BIIB-9-592 VH Nucleic Acid Sequence
cagctgcagctgcaggagtcgggcccaggactggtgaagccttcggagaccctgtccctcacctgcactgtctctggtggctccatcagcagtaacagttactactggggctggatccgccagcccccagggaaggggctggagtggattgggagtatctattatagtgggagcacctactacaacccgtccctcaagagtcgagtcaccatatccgtagacacgtccaagaaccagttctccctgaagctgagttctgtgaccgccgcagacacggcggtgtactactgcgccagagactctaactacgacagcagcggatacgccttatactactatgggatggatgtatggggccagggaacaactgtcaccgtctcctca

SEQ ID NO: 75 - protein, 121 aa, Artificial sequence
  BIIB-9-606 VH Amino Acid Sequence
QVQLVQSGAEVKKPGASVKVSCKASGYTFTSYYMHWVRQAPGQGLEWMGIINPSGGSTSYAQKFQGRVTMTRDTSTSTVYMELSSLRSEDTAVYYCARTKWSSSPYGMDVWGQGTTVTVSS

SEQ ID NO: 76 - DNA, 363 bp, Artificial sequence
  BIIB-9-606 VH Nucleic Acid Sequence
caggtgcagctggtgcagtctggggctgaggtgaagaagcctggggcctcagtgaaggtttcctgcaaggcatctggatacaccttcaccagctactatatgcactgggtgcgacaggcccctggacaagggcttgagtggatgggaataatcaaccctagtggtggtagcacaagctacgcacagaagttccagggcagagtcaccatgaccagggacacgtccacgagcacagtctacatggagctgagcagcctgagatctgaggacacggcggtgtactactgcgccagaactaaatggtcatcaagcccatacggaatggacgtatggggccagggaacaactgtcaccgtctcctca

SEQ ID NO: 77 - protein, 122 aa, Artificial sequence
  BIIB-9-608 VH Amino Acid Sequence
QLQLQESGPGLVKPSETLSLTCTVSGGSISSSSYYWGWIRQPPGKGLEWIGSIYYSGSTYYNPSLKSRVTISVDTSKNQFSLKLSSVTAADTAVYYCARDRLETSEAGMDVWGQGTTVTVSS

SEQ ID NO: 78 - DNA, 366 bp, Artificial sequence
  BIIB-9-608 VH Nucleic Acid Sequence
cagctgcagctgcaggagtcgggcccaggactggtgaagccttcggagaccctgtccctcacctgcactgtctctggtggctccatcagcagtagtagttactactggggctggatccgccagcccccagggaaggggctggagtggattgggagtatctattatagtgggagcacctactacaacccgtccctcaagagtcgagtcaccatatccgtagacacgtccaagaaccagttctccctgaagctgagttctgtgaccgccgcagacacggcggtgtactactgcgccagagacaggttggaaacaagcgaggcaggaatggacgtatggggccagggaacaactgtcaccgtctcctca

SEQ ID NO: 79 - protein, 118 aa, Artificial sequence
  BIIB-9-616 VH Amino Acid Sequence
QVQLVQSGAEVKKPGASVKVSCKASGYTFTSYYMHWVRQAPGQGLEWMGIINPSGGSTSYAQKFQGRVTMTRDTSTSTVYMELSSLRSEDTAVYYCARGGSKYFFDLWGRGTLVTVSS

SEQ ID NO: 80 - DNA, 354 bp, Artificial sequence
  BIIB-9-616 VH Nucleic Acid Sequence
caggtgcagctggtgcagtctggggctgaggtgaagaagcctggggcctcagtgaaggtttcctgcaaggcatctggatacaccttcaccagctactatatgcactgggtgcgacaggcccctggacaagggcttgagtggatgggaataatcaaccctagtggtggtagcacaagctacgcacagaagttccagggcagagtcaccatgaccagggacacgtccacgagcacagtctacatggagctgagcagcctgagatctgaggacacggcggtgtactactgcgccagaggcggttctaaatacttcttcgacctatgggggagaggtaccttggtcaccgtctcctca

SEQ ID NO: 81 - protein, 121 aa, Artificial sequence
  BIIB-9-621 VH Amino Acid Sequence
QLQLQESGPGLVKPSETLSLTCTVSGGSISSSSYYWGWIRQPPGKGLEWIGSIYYSGSTYYNPSLKSRVTISVDTSKNQFSLKLSSVTAADTAVYYCARDGSISGSRFDYWGQGTLVTVSS

SEQ ID NO: 82 - DNA, 363 bp, Artificial sequence
  BIIB-9-621 VH Nucleic Acid Sequence
cagctgcagctgcaggagtcgggcccaggactggtgaagccttcggagaccctgtccctcacctgcactgtctctggtggctccatcagcagtagtagttactactggggctggatccgccagcccccagggaaggggctggagtggattgggagtatctattatagtgggagcacctactacaacccgtccctcaagagtcgagtcaccatatccgtagacacgtccaagaaccagttctccctgaagctgagttctgtgaccgccgcagacacggcggtgtactactgcgccagagacggatctatatccggatctagattcgactactggggacagggtacattggtcaccgtctcctca

SEQ ID NO: 83 - protein, 122 aa, Artificial sequence
  BIIB-9-622 VH Amino Acid Sequence
QVQLVQSGAEVKKPGASVKVSCKASGYTFTSYYMHWVRQAPGQGLEWMGIINPSGGSTSYAQKFQGRVTMTRDTSTSTVYMELSSLRSEDTAVYYCARDGATTVSYLSFDIWGQGTMVTVSS

SEQ ID NO: 84 - DNA, 366 bp, Artificial sequence
  BIIB-9-622 VH Nucleic Acid Sequence
caggtgcagctggtgcagtctggggctgaggtgaagaagcctggggcctcagtgaaggtttcctgcaaggcatctggatacaccttcaccagctactatatgcactgggtgcgacaggcccctggacaagggcttgagtggatgggaataatcaaccctagtggtggtagcacaagctacgcacagaagttccagggcagagtcaccatgaccagggacacgtccacgagcacagtctacatggagctgagcagcctgagatctgaggacacggcggtgtactactgcgccagagatggcgctaccacagtaagctatttgtcattcgacatatggggtcagggtacaatggtcaccgtctcctca

SEQ ID NO: 85 - protein, 125 aa, Artificial sequence
  BIIB-9-627 VH Amino Acid Sequence
QVQLVQSGAEVKKPGASVKVSCKASGYTFTSYYMHWVRQAPGQGLEWMGIINPSGGSTSYAQKFQGRVTMTRDTSTSTVYMELSSLRSEDTAVYYCARADYDYWSGYGGLGMDVWGQGTTVTVSS

SEQ ID NO: 86 - DNA, 375 bp, Artificial sequence
  BIIB-9-627 VH Nucleic Acid Sequence
caggtgcagctggtgcagtctggggctgaggtgaagaagcctggggcctcagtgaaggtttcctgcaaggcatctggatacaccttcaccagctactatatgcactgggtgcgacaggcccctggacaagggcttgagtggatgggaataatcaaccctagtggtggtagcacaagctacgcacagaagttccagggcagagtcaccatgaccagggacacgtccacgagcacagtctacatggagctgagcagcctgagatctgaggacacggcggtgtactactgcgccagagctgactacgactactggagcggatacggaggtctcggaatggacgtatggggccagggaacaactgtcaccgtctcctca

SEQ ID NO: 87 - protein, 122 aa, Artificial sequence
  BIIB-9-1335 VH Amino Acid Sequence
EVQLVESGGGLVKPGGSLRLSCAASGFTFSSYDMHWVRQAPGKGLEWVSSISSGSSYIYYADSVKGRFTISRDNAKNSLYLQMNSLRAEDTAVYYCARDVGGYAGYYGMDVWGQGTTVTVSS

SEQ ID NO: 88 - DNA, 366 bp, Artificial sequence
  BIIB-9-1335 VH Nucleic Acid Sequence
gaggtgcagctggtggagtctgggggaggcctggtcaagcctggggggtccctgagactctcctgtgcagcctctggattcaccttcagtagctatgatatgcattgggtccgccaggctccagggaaggggctggagtgggtctcatccattagtagtggtagtagttacatatactacgcagactcagtgaagggccgattcaccatctccagagacaacgccaagaactcactgtatctgcaaatgaacagcctgagagccgaggacacggcggtgtactactgcgccagagatgtaggaggatacgcagggtactacggcatggatgtatggggccagggaacaactgtcaccgtctcctca

SEQ ID NO: 89 - protein, 122 aa, Artificial sequence
  BIIB-9-1336 VH Amino Acid Sequence
EVQLVESGGGLVKPGGSLRLSCAASGFTFGSYDMNWVRQAPGKGLEWVSSISSGESYIYYAESVKGRFTISRDNAKNSLYLQMNSLRAEDTAVYYCARDVGGYAGYYGMDVWGQGTTVTVSS

SEQ ID NO: 90 - DNA, 366 bp, Artificial sequence
  BIIB-9-1336 VH Nucleic Acid Sequence
gaggtgcagctggtggagtctgggggaggcctggtcaagcctggggggtccctgagactctcctgtgcagcctctggattcaccttcgggagctatgatatgaactgggtccgccaggctccagggaaggggctggagtgggtctcatccattagtagtggtgagagttacatatactacgcagagtcagtgaagggccgattcaccatctccagagacaacgccaagaactcactgtatctgcaaatgaacagcctgagagccgaggacacggcggtgtactactgcgccagagatgtaggaggatacgcagggtactacggcatggatgtatggggccagggaacaactgtcaccgtctcctca

SEQ ID NO: 91 - protein, 127 aa, Artificial sequence
  BIIB-9-408 VH Amino Acid Sequence
QVQLVQSGAEVKKPGASVKVSCKASGYTFTSYYMHWVRQAPGQGLEWMGIINPSGGSTTYAQKFQGRVTMTRDTSTSTVYMELSSLRSEDTAVYYCARDPGAYDDWSGYDDYGMDVWGQGTTVTVSS

SEQ ID NO: 92 - DNA, 381 bp, Artificial sequence
  BIIB-9-408 VH Amino Acid Sequence
caggtgcagctggtgcagtctggggctgaggtgaagaagcctggggcctcagtgaaggtttcctgcaaggcatctggatacaccttcaccagctactatatgcactgggtgcgacaggcccctggacaagggcttgagtggatgggaataatcaaccctagtggtggtagcacaacctacgcacagaagttccagggcagagtcaccatgaccagggacacgtccacgagcacagtctacatggagctgagcagcctgagatctgaggacacggcggtgtactactgcgccagagatccaggagcctacgacgactggagcggatatgatgattatggaatggacgtatggggccagggaacaactgtcaccgtctcctca

SEQ ID NO: 93 - protein, 124 aa, Artificial sequence
  BIIB-9-416 VH Amino Acid Sequence
QVQLVQSGAEVKKPGASVKVSCKASGYTFTSYYMHWVRQAPGQGLEWMGIINPSGGSTSYAQKFQGRVTMTRDTSTSTVYMELSSLRSEDTAVYYCAREGPMLDYPTYSNWFDPWGQGTLVTVS

SEQ ID NO: 94 - DNA, 375 bp, Artificial sequence
  BIIB-9-416 VH Nucleic Acid Sequence
caggtgcagctggtgcagtctggggctgaggtgaagaagcctggggcctcagtgaaggtttcctgcaaggcatctggatacaccttcaccagctactatatgcactgggtgcgacaggcccctggacaagggcttgagtggatgggaataatcaaccctagtggtggtagcacaagctacgcacagaagttccagggcagagtcaccatgaccagggacacgtccacgagcacagtctacatggagctgagcagcctgagatctgaggacacggcggtgtactactgcgccagagaaggtcctatgctagactacccaacctacagcaactggttcgacccatggggacagggtacattggtcaccgtctcctca

SEQ ID NO: 95 - protein, 124 aa, Artificial sequence
  BIIB-9-629 VH Amino Acid Sequence
QVQLVQSGAEVKKPGASVKVSCKASGYTFTSYYMHWVRQAPGQGLEWMGVINPSGGSTSYAQKFQGRVTMTRDTSTSTVYMELSSLRSEDTAVYYCARDPSQDYATGTGWFDPWGQGTLVTVSS

SEQ ID NO: 96 - DNA, 372 bp, Artificial sequence
  BIIB-9-629 VH Nucleic Acid Sequence
caggtgcagctggtgcagtctggggctgaggtgaagaagcctggggcctcagtgaaggtttcctgcaaggcatctggatacaccttcaccagctactatatgcactgggtgcgacaggcccctggacaagggcttgagtggatgggagtcatcaaccctagtggtggtagcacaagctacgcacagaagttccagggcagagtcaccatgaccagggacacgtccacgagcacagtctacatggagctgagcagcctgagatctgaggacacggcggtgtactactgcgccagagatccctctcaagactacgcaaccggaaccggttggttcgatccctggggacagggtacattggtcaccgtctcctca

SEQ ID NO: 97 - protein, 125 aa, Artificial sequence
  BIIB-9-885 VH Amino Acid Sequence
QVQLVQSGAEVKKPGASVKVSCKASGYTFTSYYMHWVRQAPGQGLEWMGIINPSGGSTSYAQKFQGRVTMTRDTSTSTVYMELSSLRSEDTAVYYCAREGPMLDYPTYSNWFDPWGQGTLVTVSS

SEQ ID NO: 98 - DNA, 375 bp, Artificial sequence; identical to SEQ ID NO: 94
  BIIB-9-885 VH Nucleic Acid Sequence

SEQ ID NO: 99 - protein, 120 aa, Artificial sequence
  BIIB-9-607 VH Amino Acid Sequence
QLQLQESGPGLVKPSETLSLTCTVSGGSISSSSYYWGWIRQPPGKGLEWIGSISYSGSTYYNPSLKSRVTISVDTSKNQFSLKLSSVTAADTAVYYCARDRGYSYEDFDLWGRGTLVTVS

SEQ ID NO: 100 - DNA, 363 bp, Artificial sequence
  BIIB-9-607 VH Nucleic Acid Sequence
cagctgcagctgcaggagtcgggcccaggactggtgaagccttcggagaccctgtccctcacctgcactgtctctggtggctccatcagcagtagtagttactactggggctggatccgccagcccccagggaaggggctggagtggattgggagtatctcctatagtgggagcacctactacaacccgtccctcaagagtcgagtcaccatatccgtagacacgtccaagaaccagttctccctgaagctgagttctgtgaccgccgcagacacggcggtgtactactgcgccagagatcgtggatacagctacgaggacttcgacctatgggggagaggtaccttggtcaccgtctcctca

SEQ ID NO: 101 - protein, 124 aa, Artificial sequence
  BIIB-9-471 VH Amino Acid Sequence
QVQLQESGPGLVKPSQTLSLTCTVSGGSISSGGYYWSWIRQHPGKGLEWIGYIYYSGSTYYNPSLKSRVTISVDTSKNQFSLKLSSVTAADTAVYYCARSGVSGSGSDNWFDPWGQGTTVTVSS

SEQ ID NO: 102 - DNA, 372 bp, Artificial sequence
  BIIB-9-471 VH Nucleic Acid Sequence
caggtgcagctgcaggagtcgggcccaggactggtgaagccttcacagaccctgtccctcacctgtactgtctctggtggctccatcagcagtggtggttactactggagctggatccgccagcacccagggaagggcctggagtggattgggtacatctattacagtgggagcacctactacaacccgtccctcaagagtcgagttaccatatcagtagacacgtctaagaaccagttctccctgaagctgagttctgtgaccgccgcagacacggcggtgtactactgcgccagatcaggagtgagcggatcgggatctgataattggttcgatccatggggacagggtacaactgtcaccgtctcctca

SEQ ID NO: 103 - protein, 121 aa, Artificial sequence
  BIIB-9-472 VH Amino Acid Sequence
EVQLVESGGGLVKPGGSLRLSCAASGFTFSSYSMNWVRQAPGKGLEWVSSISSSSSYIYYADSVKGRFTISRDNAKNSLYLQMNSLRAEDTAVYYCARGGRYSGSWSWNIWGQGTMVTVSS

SEQ ID NO: 104 - DNA, 363 bp, Artificial sequence
  BIIB-9-472 VH Nucleic Acid Sequence
gaggtgcagctggtggagtctgggggaggcctggtcaagcctggggggtccctgagactctcctgtgcagcctctggattcaccttcagtagctatagcatgaactgggtccgccaggctccagggaaggggctggagtgggtctcatccattagtagtagtagtagttacatatactacgcagactcagtgaagggccgattcaccatctccagagacaacgccaagaactcactgtatctgcaaatgaacagcctgagagccgaggacacggcggtgtactactgcgccagaggaggtagatacagcggctcgtggagctggaacatatggggtcagggtacaatggtcaccgtctcctca

SEQ ID NO: 105 - protein, 120 aa, Artificial sequence
  BIIB-9-439 VH Amino Acid Sequence
QVQLVQSGAEVKKPGASVKVSCKASGYTFTSYYMHWVRQAPGQGLEWMGIINPSGGSTTYAQKFQGRVTMTRDTSTSTVYMELSSLRSEDTAVYYCAREATESYYYMDVWGKGTTVTVSS

SEQ ID NO: 106 - DNA, 360 bp, Artificial sequence
  BIIB-9-439 VH Nucleic Acid Sequence
caggtgcagctggtgcagtctggggctgaggtgaagaagcctggggcctcagtgaaggtttcctgcaaggcatctggatacaccttcaccagctactatatgcactgggtgcgacaggcccctggacaagggcttgagtggatgggaataatcaaccctagtggtggtagcacaacctacgcacagaagttccagggcagagtcaccatgaccagggacacgtccacgagcacagtctacatggagctgagcagcctgagatctgaggacacggcggtgtactactgcgccagagaggctacagaaagctactactacatggacgtatggggcaagggtacaactgtcaccgtctcctca

SEQ ID NO: 107 - protein, 121 aa, Artificial sequence
  BIIB-9-446 VH Amino Acid Sequence
QVQLVQSGAEVKKPGSSVKVSCKASGGTFSSYAISWVRQAPGQGLEWMGGIIPIFGTASYAQKFQGRVTITADESTSTAYMELSSLRSEDTAVYYCARGLEVGYYGYFDYWGQGTLVTVSS

SEQ ID NO: 108 - DNA, 363 bp, Artificial sequence
  BIIB-9-446 VH Nucleic Acid Sequence
caggtgcagctggtgcagtctggggctgaggtgaagaagcctgggtcctcggtgaaggtctcctgcaaggcttctggaggcaccttcagcagctatgctatcagctgggtgcgacaggcccctggacaagggcttgagtggatgggagggatcatccctatctttggtacagcaagctacgcacagaagttccagggcagagtcacgattaccgcggacgaatccacgagcacagcctacatggagctgagcagcctgagatctgaggacacggcggtgtactactgcgccagagggttggaagtgggatattatggatactttgattactggggacagggtacattggtcaccgtctcctca

SEQ ID NO: 109 - protein, 121 aa, Artificial sequence
  BIIB-9-568 VH Amino Acid Sequence
QLQLQESGPGLVKPSETLSLTCTVSGGSISSSSYYWGWIRQPPGKGLEWIGSIYYSGSTYYNPSLKSRVTISVDTSKNQFSLKLSSVTAADTAVYYCARDLGYAATYFDLWGRGTLVTVSS

SEQ ID NO: 110 - DNA, 363 bp, Artificial sequence
  BIIB-9-568 VH Nucleic Acid Sequence
cagctgcagctgcaggagtcgggcccaggactggtgaagccttcggagaccctgtccctcacctgcactgtctctggtggctccatcagcagtagtagttactactggggctggatccgccagcccccagggaaggggctggagtggattgggagtatctattatagtgggagcacctactacaacccgtccctcaagagtcgagtcaccatatccgtagacacgtccaagaaccagttctccctgaagctgagttctgtgaccgccgcagacacggcggtgtactactgcgccagagacttgggatacgcagctacctacttcgacctatgggggagaggtaccttggtcaccgtctcctca

SEQ ID NO: 111 - protein, 122 aa, Artificial sequence
  BIIB-9-615 VH Amino Acid Sequence
QVQLVQSGAEVKKPGASVKVSCKASGYTFTSYYMHWVRQAPGQGLEWMGIINPSGGSTSYAQKFQGRVTMTRDTSTSTVYMELSSLRSEDTAVYYCARDSPSSSSYWSLDLWGRGTLVTVSS

SEQ ID NO: 112 - DNA, 366 bp, Artificial sequence
  BIIB-9-615 VH Nucleic Acid Sequence
caggtgcagctggtgcagtctggggctgaggtgaagaagcctggggcctcagtgaaggtttcctgcaaggcatctggatacaccttcaccagctactatatgcactgggtgcgacaggcccctggacaagggcttgagtggatgggaataatcaaccctagtggtggtagcacaagctacgcacagaagttccagggcagagtcaccatgaccagggacacgtccacgagcacagtctacatggagctgagcagcctgagatctgaggacacggcggtgtactactgcgccagagactctcctagcagcagctcgtactggagtttagacctatgggggagaggtaccttggtcaccgtctcctca

SEQ ID NO: 113 - protein, 120 aa, Artificial sequence
  BIIB-9-628 VH Amino Acid Sequence
QVQLVQSGAEVKKPGASVKVSCKASGYTFTSYYMHWVRQAPGQGLEWMGIINPSGGSTSYAQKFQGRVTMTRDTSTSTVYMELSSLRSEDTAVYYCAREPIAYGATLDLWGRGTLVTVSS

SEQ ID NO: 114 - DNA, 360 bp, Artificial sequence
  BIIB-9-628 VH Nucleic Acid Sequence
caggtgcagctggtgcagtctggggctgaggtgaagaagcctggggcctcagtgaaggtttcctgcaaggcatctggatacaccttcaccagctactatatgcactgggtgcgacaggcccctggacaagggcttgagtggatgggaataatcaaccctagtggtggtagcacaagctacgcacagaagttccagggcagagtcaccatgaccagggacacgtccacgagcacagtctacatggagctgagcagcctgagatctgaggacacggcggtgtactactgcgccagagagcctatagcctacggtgctaccttagacctatgggggagaggtaccttggtcaccgtctcctca

SEQ ID NO: 115 - protein, 122 aa, Artificial sequence; identical to SEQ ID NO: 25
  BIIB-9-882 VH Amino Acid Sequence

SEQ ID NO: 116 - DNA, 366 bp, Artificial sequence; identical to SEQ ID NO: 26
  BIIB-9-882 VH Nucleic Acid Sequence

SEQ ID NO: 117 - protein, 124 aa, Artificial sequence; identical to SEQ ID NO: 19
  BIIB-9-884 VH Amino Acid Sequence

SEQ ID NO: 118 - DNA, 372 bp, Artificial sequence; identical to SEQ ID NO: 20
  BIIB-9-884 VH Nucleic Acid Sequence

SEQ ID NO: 119 - protein, 121 aa, Artificial sequence
  BIIB-9-886 VH Amino Acid Sequence
QVQLVQSGAEVKKPGASVKVSCKASGYTFTSYYMHWVRQAPGQGLEWMGIINPSGGSTSYAQKFQGRVTMTRDTSTSTVYMELSSLRSEDTAVYYCARDPAHSYLDAFDIWGQGTMVTVSS

SEQ ID NO: 120 - DNA, 363 bp, Artificial sequence
  BIIB-9-886 VH Nucleic Acid Sequence
caggtgcagctggtgcagtctggggctgaggtgaagaagcctggggcctcagtgaaggtttcctgcaaggcatctggatacaccttcaccagctactatatgcactgggtgcgacaggcccctggacaagggcttgagtggatgggaataatcaaccctagtggtggtagcacaagctacgcacagaagttccagggcagagtcaccatgaccagggacacgtccacgagcacagtctacatggagctgagcagcctgagatctgaggacacggcggtgtactactgcgccagagatcccgctcactcctacctagacgcctttgatatttggggtcagggtacaatggtcaccgtctcctca

SEQ ID NO: 121 - protein, 121 aa, Artificial sequence
  BIIB-9-887 VH Amino Acid Sequence
QVQLVQSGAEVKKPGASVKVSCKASGYTFTSYYMVWVRQAPGQGLEWMGIINPSGGSTSYAQKFQGRVTMTRDTSTSTVYMELSSLRSEDTAVYYCARDAEAHWIPGMDVWGQGTTVTVSS

SEQ ID NO: 122 - DNA, 363 bp, Artificial sequence
  BIIB-9-887 VH Nucleic Acid Sequence
caggtgcagctggtgcagtctggggctgaggtgaagaagcctggggcctcagtgaaggtttcctgcaaggcatctggatacaccttcaccagctactatatggtctgggtgcgacaggcccctggacaagggcttgagtggatgggaataatcaaccctagtggtggtagcacaagctacgcacagaagttccagggcagagtcaccatgaccagggacacgtccacgagcacagtctacatggagctgagcagcctgagatctgaggacacggcggtgtactactgcgccagagatgctgaagcacactggatccccggaatggacgtatggggccagggaacaactgtcaccgtctcctca

SEQ ID NO: 123 - protein, 122 aa, Artificial sequence; identical to SEQ ID NO: 25
  BIIB-9-888 VH Amino Acid Sequence

SEQ ID NO: 124 - DNA, 366 bp, Artificial sequence; identical to SEQ ID NO: 26
  BIIB-9-888 VH Nucleic Acid Sequence

SEQ ID NO: 125 - protein, 121 aa, Artificial sequence
  BIIB-9-889 VH Amino Acid Sequence
QLQLQESGPGLVKPSETLSLTCTVSGGSISSSSYYWGWIRQPPGKGLEWIGSIYYSGSTYYNPSLKSRVTISVDTSKNQFSLKLSSVTAADTAVYYCARDVGWYTEYFDLWGRGTLVTVSS

SEQ ID NO: 126 - DNA, 363 bp, Artificial sequence
  BIIB-9-889 VH Nucleic Acid Sequence
cagctgcagctgcaggagtcgggcccaggactggtgaagccttcggagaccctgtccctcacctgcactgtctctggtggctccatcagcagtagtagttactactggggctggatccgccagcccccagggaaggggctggagtggattgggagtatctattatagtgggagcacctactacaacccgtccctcaagagtcgagtcaccatatccgtagacacgtccaagaaccagttctccctgaagctgagttctgtgaccgccgcagacacggcggtgtactactgcgccagagatgtaggatggtacaccgaatacttcgacctatgggggagaggtaccttggtcaccgtctcctca

SEQ ID NO: 127 - protein, 121 aa, Artificial sequence
  BIIB-9-433 VH Amino Acid Sequence
QLQLQESGPGLVKPSETLSLTCTVSGGSISSSRYYWGWIRQPPGKGLEWIGSIYYSGSTYYNPSLKSRVTISVDTSKNQFSLKLSSVTAADTAVYYCARDAGYSAELFDYWGQGTLVTVSS

SEQ ID NO: 128 - DNA, 363 bp, Artificial sequence
  BIIB-9-433 VH Nucleic Acid Sequence
cagctgcagctgcaggagtcgggcccaggactggtgaagccttcggagaccctgtccctcacctgcactgtctctggtggctccatcagcagtagtcgctactactggggctggatccgccagcccccagggaaggggctggagtggattgggagtatctattatagtgggagcacctactacaacccgtccctcaagagtcgagtcaccatatccgtagacacgtccaagaaccagttctccctgaagctgagttctgtgaccgccgcagacacggcggtgtactactgcgccagagacgcaggatacagcgcagagttgttcgactactggggacagggtacattggtcaccgtctcctca

SEQ ID NO: 129 - protein, 119 aa, Artificial sequence
  BIIB-9-445 VH Amino Acid Sequence
QVQLVQSGAEVKKPGASVKVSCKASGYTFTSYYIHWVRQAPGQGLEWMGIINPSGGSTSYAQKFQGRVTMTRDTSTSTVYMELSSLRSEDTAVYYCARDVGQDYWFDLWGRGTLVTVSS

SEQ ID NO: 130 - DNA, 357 bp, Artificial sequence
  BIIB-9-445 VH Nucleic Acid Sequence
caggtgcagctggtgcagtctggggctgaggtgaagaagcctggggcctcagtgaaggtttcctgcaaggcatctggatacaccttcaccagctactatatccactgggtgcgacaggcccctggacaagggcttgagtggatgggaataatcaaccctagtggtggtagcacaagctacgcacagaagttccagggcagagtcaccatgaccagggacacgtccacgagcacagtctacatggagctgagcagcctgagatctgaggacacggcggtgtactactgcgccagagatgtaggacaagactactggttcgacctatgggggagaggtaccttggtcaccgtctcctca

SEQ ID NO: 131 - protein, 118 aa, Artificial sequence
  BIIB-9-470 VH Amino Acid Sequence
EVQLVESGGGLVQPGGSLRLSCAASGFTFSSYWMSWVRQAPGKGLEWVANIKQDGSEKYYVDSVKGRFTISRDNAKNSLYLQMNSLRAEDTAVYYCARDAGIAWALDYWGQGTLVTVS

SEQ ID NO: 132 - DNA, 357 bp, Artificial sequence
  BIIB-9-470 VH Nucleic Acid Sequence
gaggtgcagctggtggagtctgggggaggcttggtccagcctggggggtccctgagactctcctgtgcagcctctggattcacctttagtagctattggatgagctgggtccgccaggctccagggaaggggctggagtgggtggccaacataaagcaagatggaagtgagaaatactatgtggactctgtgaagggccgattcaccatctccagagacaacgccaagaactcactgtatctgcaaatgaacagcctgagagccgaggacacggcggtgtactactgcgccagagatgctggcatagcctgggccttagattactggggacagggtacattggtcaccgtctcctca

SEQ ID NO: 133 - protein, 121 aa, Artificial sequence
  BIIB-9-625 VH Amino Acid Sequence
QLQLQESGPGLVKPSETLSLTCTVSGGSISSSSYAWGWIRQPPGKGLEWIGSIYYSGSTYYNPSLKSRVTISVDTSKNQFSLKLSSVTAADTAVYYCARDRGWYTEVLDIWGQGTMVTVSS

SEQ ID NO: 134 - DNA, 363 bp, Artificial sequence
  BIIB-9-625 VH Nucleic Acid Sequence
cagctgcagctgcaggagtcgggcccaggactggtgaagccttcggagaccctgtccctcacctgcactgtctctggtggctccatcagcagtagtagttacgcatggggctggatccgccagcccccagggaaggggctggagtggattgggagtatctattatagtgggagcacctactacaacccgtccctcaagagtcgagtcaccatatccgtagacacgtccaagaaccagttctccctgaagctgagttctgtgaccgccgcagacacggcggtgtactactgcgccagagatcgtggatggtacaccgaagtgttagacatatggggtcagggtacaatggtcaccgtctcctca

SEQ ID NO: 135 - protein, 120 aa, Artificial sequence
  BIIB-9-1264 VH Amino Acid Sequence
QVQLVQSGAEVKKPGASVKVSCKASGYTFTSYYMHWVRQAPGQGLEWMGIINPSGGSTSYAQKFQGRVTMTRDTSTSTVYMELSSLRSEDTAVYYCARDGDSSVYAFDYWGQGTLVTVSS

SEQ ID NO: 136 - DNA, 360 bp, Artificial sequence
  BIIB-9-1264 VH Nucleic Acid Sequence
caggtgcagctggtgcagtctggggctgaggtgaagaagcctggggcctcagtgaaggtttcctgcaaggcatctggatacaccttcaccagctactatatgcactgggtgcgacaggcccctggacaagggcttgagtggatgggaataatcaaccctagtggtggtagcacaagctacgcacagaagttccagggcagagtcaccatgaccagggacacgtccacgagcacagtctacatggagctgagcagcctgagatctgaggacacggcggtgtactactgcgccagagacggagacagcagcgtgtacgccttcgattattggggacagggtacattggtcaccgtctcctca

SEQ ID NO: 137 - protein, 121 aa, Artificial sequence
  BIIB-9-1265 VH Amino Acid Sequence
QLQLQESGPGLVKPSETLSLTCTVSGGSISSSSYYWGWIRQPPGKGLEWIGSIYYSGSTYYNPSLKSRVTISVDTSKNQFSLKLSSVTAADTAVYYCARDGRHYYELFDYWGQGTLVTVSS

SEQ ID NO: 138 - DNA, 363 bp, Artificial sequence
  BIIB-9-1265 VH Nucleic Acid Sequence
cagctgcagctgcaggagtcgggcccaggactggtgaagccttcggagaccctgtccctcacctgcactgtctctggtggctccatcagcagtagtagttactactggggctggatccgccagcccccagggaaggggctggagtggattgggagtatctattatagtgggagcacctactacaacccgtccctcaagagtcgagtcaccatatccgtagacacgtccaagaaccagttctccctgaagctgagttctgtgaccgccgcagacacggcggtgtactactgcgccagagacggcagacactactacgagttgttcgactactggggacagggtacattggtcaccgtctcctca

SEQ ID NO: 139 - protein, 120 aa, Artificial sequence
  BIIB-9-1266 VH Amino Acid Sequence
QVQLVQSGAEVKKPGASVKVSCKASGYTFTSYYMHWVRQAPGQGLEWMGIINPSGGSTSYAQKFQGRVTMTRDTSTSTVYMELSSLRSEDTAVYYCARDHGWAIYGMDVWGQGTTVTVSS

SEQ ID NO: 140 - DNA, 360 bp, Artificial sequence
  BIIB-9-1266 VH Nucleic Acid Sequence
caggtgcagctggtgcagtctggggctgaggtgaagaagcctggggcctcagtgaaggtttcctgcaaggcatctggatacaccttcaccagctactatatgcactgggtgcgacaggcccctggacaagggcttgagtggatgggaataatcaaccctagtggtggtagcacaagctacgcacagaagttccagggcagagtcaccatgaccagggacacgtccacgagcacagtctacatggagctgagcagcctgagatctgaggacacggcggtgtactactgcgcaagagaccacggatgggccatctacggaatggacgtatggggccagggaacaactgtcaccgtctcctca

SEQ ID NO: 141 - protein, 120 aa, Artificial sequence; identical to SEQ ID NO: 139
  BIIB-9-1267 VH Amino Acid Sequence

SEQ ID NO: 142 - DNA, 360 bp, Artificial sequence; identical to SEQ ID NO: 140
  BIIB-9-1267 VH Nucleic Acid Sequence

SEQ ID NO: 143 - protein, 119 aa, Artificial sequence
  BIIB-9-1268 VH Amino Acid Sequence
QVQLVQSGAEVKKPGASVKVSCKASGYTFTSYYMHWVRQAPGQGLEWMGIINPSGGSTSYAQKFQGRVTMTRDTSTSTVYMELSSLRSEDTAVYYCARDPPSWYVFDIWGQGTMVTVSS

SEQ ID NO: 144 - DNA, 357 bp, Artificial sequence
  BIIB-9-1268 VH Nucleic Acid Sequence
caggtgcagctggtgcagtctggggctgaggtgaagaagcctggggcctcagtgaaggtttcctgcaaggcatctggatacaccttcaccagctactatatgcactgggtgcgacaggcccctggacaagggcttgagtggatgggaataatcaaccctagtggtggtagcacaagctacgcacagaagttccagggcagagtcaccatgaccagggacacgtccacgagcacagtctacatggagctgagcagcctgagatctgaggacacggcggtgtactactgcgccagagacccacctagttggtacgtattcgacatatggggtcagggtacaatggtcaccgtctcctca

SEQ ID NO: 145 - protein, 119 aa, Artificial sequence
  BIIB-9-1269 VH Amino Acid Sequence
QVQLVQSGAEVKKPGASVKVSCKASGYTFTSYYMHWVRQAPGQGLEWMGIINPSGGSTSYAQKFQGRVTMTRDTSTSTVYMELSSLRSEDTAVYYCARDRGQYYHFDLWGRGTLVTVSS

SEQ ID NO: 146 - DNA, 357 bp, Artificial sequence
  BIIB-9-1269 VH Nucleic Acid Sequence
caggtgcagctggtgcagtctggggctgaggtgaagaagcctggggcctcagtgaaggtttcctgcaaggcatctggatacaccttcaccagctactatatgcactgggtgcgacaggcccctggacaagggcttgagtggatgggaataatcaaccctagtggtggtagcacaagctacgcacagaagttccagggcagagtcaccatgaccagggacacgtccacgagcacagtctacatggagctgagcagcctgagatctgaggacacggcggtgtactactgcgccagagatcgtggacaatactaccacttcgacctatgggggagaggtaccttggtcaccgtctcctca

SEQ ID NO: 147 - protein, 118 aa, Artificial sequence
  BIIB-9-1270 VH Amino Acid Sequence
QVQLVQSGAEVKKPGASVKVSCKASGYTFTSYYMHWVRQAPGQGLEWMGIINPSGGSTSYAQKFQGRVTMTRDTSTSTVYMELSSLRSEDTAVYYCARDTGGYAFDIWGQGTLVTVSS

SEQ ID NO: 148 - DNA, 354 bp, Artificial sequence
  BIIB-9-1270 VH Nucleic Acid Sequence
caggtgcagctggtgcagtctggggctgaggtgaagaagcctggggcctcagtgaaggtttcctgcaaggcatctggatacaccttcaccagctactatatgcactgggtgcgacaggcccctggacaagggcttgagtggatgggaataatcaaccctagtggtggtagcacaagctacgcacagaagttccagggcagagtcaccatgaccagggacacgtccacgagcacagtctacatggagctgagcagcctgagatctgaggacacggcggtgtactactgcgccagagacacgggaggatacgcctttgatatttggggacagggtacattggtcaccgtctcctca

SEQ ID NO: 149 - protein, 118 aa, Artificial sequence; identical to SEQ ID NO: 147
  BIIB-9-1271 VH Amino Acid Sequence

SEQ ID NO: 150 - DNA, 354 bp, Artificial sequence; identical to SEQ ID NO: 148
  BIIB-9-1271 VH Nucleic Acid Sequence

SEQ ID NO: 151 - protein, 118 aa, Artificial sequence; identical to SEQ ID NO: 147
  BIIB-9-1272 VH Amino Acid Sequence

SEQ ID NO: 152 - DNA, 354 bp, Artificial sequence; identical to SEQ ID NO: 148
  BIIB-9-1272 VH Nucleic Acid Sequence

SEQ ID NO: 153 - protein, 118 aa, Artificial sequence; identical to SEQ ID NO: 147
  BIIB-9-1273 VH Amino Acid Sequence

SEQ ID NO: 154 - DNA, 354 bp, Artificial sequence; identical to SEQ ID NO: 148
  BIIB-9-1273 VH Nucleic Acid Sequence

SEQ ID NO: 155 - protein, 118 aa, Artificial sequence; identical to SEQ ID NO: 147
  BIIB-9-1274 VH Amino Acid Sequence

SEQ ID NO: 156 - DNA, 354 bp, Artificial sequence; identical to SEQ ID NO: 148
  BIIB-9-1274 VH Nucleic Acid Sequence

SEQ ID NO: 157 - protein, 121 aa, Artificial sequence
  BIIB-9-1275 VH Amino Acid Sequence
QLQLQESGPGLVKPSETLSLTCTVSGGSISSSSYYWGWIRQPPGKGLEWIGSIYYSGSTYYNPSLKSRVTISVDTSKNQFSLKLSSVTAADTAVYYCARDVGRTYELFDIWGQGTMVTVSS

SEQ ID NO: 158 - DNA, 363 bp, Artificial sequence
  BIIB-9-1275 VH Nucleic Acid Sequence
cagctgcagctgcaggagtcgggcccaggactggtgaagccttcggagaccctgtccctcacctgcactgtctctggtggctccatcagcagtagtagttactactggggctggatccgccagcccccagggaaggggctggagtggattgggagtatctattatagtgggagcacctactacaacccgtccctcaagagtcgagtcaccatatccgtagacacgtccaagaaccagttctccctgaagctgagttctgtgaccgccgcagacacggcggtgtactactgcgccagagatgtaggaagaacctacgagctattcgacatatggggtcagggtacaatggtcaccgtctcctca

SEQ ID NO: 159 - protein, 121 aa, Artificial sequence; identical to SEQ ID NO: 157
  BIIB-9-1276 VH Amino Acid Sequence

SEQ ID NO: 160 - DNA, 363 bp, Artificial sequence; identical to SEQ ID NO: 158
  BIIB-9-1276 VH Nucleic Acid Sequence

SEQ ID NO: 161 - protein, 132 aa, Artificial sequence
  BIIB-9-1277 VH Amino Acid Sequence
QVQLVQSGAEVKKPGASVKVSCKASGYTFTSYYMHWVRQAPGQGLEWMGIINPSGGSTSYAQKFQGRVTMTRDTSTSTVYMELSSLRSEDTAVYYCARGGTGYYYGSGSRDGYHYYYGMDVWGQGTTVTVSS

SEQ ID NO: 162 - DNA, 396 bp, Artificial sequence
  BIIB-9-1277 VH Nucleic Acid Sequence
caggtgcagctggtgcagtctggggctgaggtgaagaagcctggggcctcagtgaaggtttcctgcaaggcatctggatacaccttcaccagctactatatgcactgggtgcgacaggcccctggacaagggcttgagtggatgggaataatcaaccctagtggtggtagcacaagctacgcacagaagttccagggcagagtcaccatgaccagggacacgtccacgagcacagtctacatggagctgagcagcctgagatctgaggacacggcggtgtactactgcgccagaggtggaactgggtactactacggaagcggaagcagagacggctaccactattactacggcatggacgtatggggccagggaacaactgtcaccgtctcctca

SEQ ID NO: 163 - protein, 122 aa, Artificial sequence
  BIIB-9-1278 VH Amino Acid Sequence
QVQLVQSGAEVKKPGASVKVSCKASGYTFTSYYMVWVRQAPGQGLEWMGIINPSGGSTSYAQKFQGRVTMTRDTSTSTVYMELSSLRSEDTAVYYCARGPGELGYYLAFDIWGQGTMVTVSS

SEQ ID NO: 164 - DNA, 366 bp, Artificial sequence
  BIIB-9-1278 VH Nucleic Acid Sequence
caggtgcagctggtgcagtctggggctgaggtgaagaagcctggggcctcagtgaaggtttcctgcaaggcatctggatacaccttcaccagctactatatggtctgggtgcgacaggcccctggacaagggcttgagtggatgggaataatcaaccctagtggtggtagcacaagctacgcacagaagttccagggcagagtcaccatgaccagggacacgtccacgagcacagtctacatggagctgagcagcctgagatctgaggacacggcggtgtactactgcgccagaggacctggagaattgggatattatttagccttcgatatctggggtcagggtacaatggtcaccgtctcctca

SEQ ID NO: 165 - protein, 122 aa, Artificial sequence; identical to SEQ ID NO: 25
  BIIB-9-1279 VH Amino Acid Sequence

SEQ ID NO: 166 - DNA, 366 bp, Artificial sequence; identical to SEQ ID NO: 26
  BIIB-9-1279 VH Nucleic Acid Sequence

SEQ ID NO: 167 - protein, 120 aa, Artificial sequence; identical to SEQ ID NO: 61
  BIIB-9-1280 VH Amino Acid Sequence

SEQ ID NO: 168 - DNA, 360 bp, Artificial sequence; identical to SEQ ID NO: 62
  BIIB-9-1280 VH Nucleic Acid Sequence

SEQ ID NO: 169 - protein, 119 aa, Artificial sequence
  BIIB-9-1281 VH Amino Acid Sequence
QVQLQQWGAGLLKPSETLSLTCAVYGGSFSGYYWSWIRQPPGKGLEWIGEIDHSGSTNYNPSLKSRVTISVDTSKNQFSLKLSSVTAADTAVYYCARTTRSKYYGMDVWGQGTMVTVSS

SEQ ID NO: 170 - DNA, 357 bp, Artificial sequence
  BIIB-9-1281 VH Nucleic Acid Sequence
caagtacaattacaacagtggggagctggtttattaaagccttcagaaactttaagtttgacctgtgctgtttacggtggatcattttctggttattactggagttggattcgtcaaccaccaggcaaaggattggagtggatcggtgagatagaccattcaggctccactaactacaatccaagtttaaaatccagggttactatctccgtagacacgtccaagaaccagttctccctgaagctgagttctgtgaccgccgcagacacggcggtgtactactgcgccagaactacaagatccaaatactacggcatggatgtatggggccagggtacaatggtcaccgtctcctca

SEQ ID NO: 171 - protein, 122 aa, Artificial sequence; identical to SEQ ID NO: 35
  BIIB-9-1282 VH Amino Acid Sequence

SEQ ID NO: 172 - DNA, 366 bp, Artificial sequence; identical to SEQ ID NO: 36
  BIIB-9-1282 VH Nucleic Acid Sequence

SEQ ID NO: 173 - protein, 122 aa, Artificial sequence; identical to SEQ ID NO: 35
  BIIB-9-1283 VH Amino Acid Sequence

SEQ ID NO: 174 - DNA, 366 bp, Artificial sequence; identical to SEQ ID NO: 36
  BIIB-9-1283 VH Nucleic Acid Sequence

SEQ ID NO: 175 - protein, 122 aa, Artificial sequence; identical to SEQ ID NO: 35
  BIIB-9-1284 VH Amino Acid Sequence

SEQ ID NO: 176 - DNA, 366 bp, Artificial sequence
  BIIB-9-1284 VH Nucleic Acid Sequence
caggtgcagctggtgcagtctggggctgaggtgaagaagcctggggcctcagtgaaggtttcctgcaaggcatcaggatacaccttcaccagctactatatggtctgggtgcgacaggcccctggacaagggcttgagtggatgggaataatcaaccctagtggtggtagcacaagctacgcacagaagttccagggcagagtcaccatgaccagggacacgtccacgagcacagtctacatggagctgagcagcctgagatctgaggacacggcggtgtactactgcgccagagtccctacatacagatacagctacttagccttcgatatctggggtcagggtacaatggtcaccgtctcctca

SEQ ID NO: 177 - protein, 122 aa, Artificial sequence; identical to SEQ ID NO: 35
  BIIB-9-1285 VH Amino Acid Sequence

SEQ ID NO: 178 - DNA, 366 bp, Artificial sequence; identical to SEQ ID NO: 36
  BIIB-9-1285 VH Nucleic Acid Sequence

SEQ ID NO: 179 - protein, 110 aa, Artificial sequence
  BIIB-9-1286 VH Amino Acid Sequence
KPGASVKVSCKASGYTFTSYYMVWVRQAPGQGLEWMGIINPSGGSTSYAQKFQGRVTMTRDTSTSTVYMELSSLRSEDTAVYYCARVPTYRYSYLAFDIWGQGTMVTVSS

SEQ ID NO: 180 - DNA, 366 bp, Artificial sequence; identical to SEQ ID NO: 36
  BIIB-9-1286 VH Nucleic Acid Sequence

SEQ ID NO: 181 - protein, 124 aa, Artificial sequence; identical to SEQ ID NO: 19
  BIIB-9-1287 VH Amino Acid Sequence

SEQ ID NO: 182 - DNA, 372 bp, Artificial sequence; identical to SEQ ID NO: 20
  BIIB-9-1287 VH Nucleic Acid Sequence

SEQ ID NO: 183 - protein, 119 aa, Artificial sequence
  BIIB-9-397 VH Amino Acid Sequence
QVQLQESGPGLVKPSETLSLTCAVSGYSISSGYYWAWIRQPPGKGLEWIGSIYHSGSTYYNPSLKSRVTISVDTSKNQFSLKLSSVTAADTAVYYCARDVWYVGGFDPWGQGTLVTVSS

SEQ ID NO: 184 - DNA, 357 bp, Artificial sequence
  BIIB-9-397 VH Nucleic Acid Sequence
caggtgcagctgcaggagtcgggcccaggactggtgaagccttcggagaccctgtccctcacctgcgctgtctctggttactccatcagcagtggttactactgggcttggatccggcagcccccagggaaggggctggagtggattgggagtatctatcatagtgggagcacctactacaacccgtccctcaagagtcgagtcaccatatcagtagacacgtccaagaaccagttctccctgaagctgagttctgtgaccgccgcagacacggcggtgtactactgcgccagagatgtgtggtacgtcggcggtttcgatccctggggacagggtacattggtcaccgtctcctca

SEQ ID NO: 185 - protein, 120 aa, Artificial sequence
  BIIB-9-578 VH Amino Acid Sequence
QLQLQESGPGLVKPSETLSLTCTVSGGSISSSSYYWGWIRQPPGKGLEWIGSISYSGSTYYNPSLKSRVTISVDTSKNQFSLKLSSVTAADTAVYYCARDKYQDYSFDIWGQGTMVTVSS

SEQ ID NO: 186 - DNA, 360 bp, Artificial sequence
  BIIB-9-578 VH Nucleic Acid Sequence
cagctgcagctgcaggagtcgggcccaggactggtgaagccttcggagaccctgtccctcacctgcactgtctctggtggctccatcagcagtagtagttactactggggctggatccgccagcccccagggaaggggctggagtggattgggagtatctcctatagtgggagcacctactacaacccgtccctcaagagtcgagtcaccatatccgtagacacgtccaagaaccagttctccctgaagctgagttctgtgaccgccgcagacacggcggtgtactactgcgctagagataagtaccaagactattcattcgacatatggggtcagggtacaatggtcaccgtctcctca

SEQ ID NO: 187 - protein, 118 aa, Artificial sequence
  BIIB-9-631 VH Amino Acid Sequence
QVQLVQSGAEVKKPGASVKVSCKASGYTFTSYYMHWVRQAPGQGLEWMGIINPSGGSTSYAQKFQGRVTMTRDTSTSTVYMELSSLRSEDTAVYYCARAENRGDYEAWGQGTLVTVSS

SEQ ID NO: 188 - DNA, 354 bp, Artificial sequence
  BIIB-9-631 VH Nucleic Acid Sequence
caggtgcagctggtgcagtctggggctgaggtgaagaagcctggggcctcagtgaaggtttcctgcaaggcatctggatacaccttcaccagctactatatgcactgggtgcgacaggcccctggacaagggcttgagtggatgggaataatcaaccctagtggtggtagcacaagctacgcacagaagttccagggcagagtcaccatgaccagggacacgtccacgagcacagtctacatggagctgagcagcctgagatctgaggacacggcggtgtactactgcgccagagccgagaacagaggagactacgaggcatggggacagggtacattggtcaccgtctcctca

SEQ ID NO: 189 - protein, 120 aa, Artificial sequence
  BIIB-9-612 VH Amino Acid Sequence
QVQLVQSGAEVKKPGASVKVSCKASGYTFTSYYMHWVRQAPGQGLEWMGIINPSGGSTSYAQKFQGRVTMTRDTSTSTVYMELSSLRSEDTAVYYCARDAGYHWYGMDVWGQGTTVTVSS

SEQ ID NO: 190 - DNA, 360 bp, Artificial sequence
  BIIB-9-612 VH Nucleic Acid Sequence
caggtgcagctggtgcagtctggggctgaggtgaagaagcctggggcctcagtgaaggtttcctgcaaggcatctggatacaccttcaccagctactatatgcactgggtgcgacaggcccctggacaagggcttgagtggatgggaataatcaaccctagtggtggtagcacaagctacgcacagaagttccagggcagagtcaccatgaccagggacacgtccacgagcacagtctacatggagctgagcagcctgagatctgaggacacggcggtgtactactgcgccagagacgcaggataccactggtacggaatggacgtatggggccagggaacaactgtcaccgtctcctca

SEQ ID NO: 191 - protein, 107 aa, Artificial sequence
  BIIB-9-605 VL Amino Acid Sequence
DIQMTQSPSSVSASVGDRVTITCRASQGISSWLAWYQQKPGKAPKLLIYAASSLQSGVPSRFSGSGSGTDFTLTISSLQPEDFATYYCQQADVFPFTFGGGTKVEIK

SEQ ID NO: 192 - DNA, 321 bp, Artificial sequence
  BIIB-9-605 VL Nucleic Acid Sequence
gacatccagatgacccagtctccatcttccgtgtctgcatctgtaggagacagagtcaccatcacttgtcgggcgagtcagggtattagcagctggttagcctggtatcagcagaaaccagggaaagcccctaagctcctgatctatgctgcatccagtttgcaaagtggggtcccatcaaggttcagcggcagtggatctgggacagatttcactctcaccatcagcagcctgcagcctgaagattttgcaacttattactgtcagcaggcagacgtcttccctttcacttttggcggagggaccaaggttgagatcaaa

SEQ ID NO: 193 - protein, 107 aa, Artificial sequence
  BIIB-9-475 VL Amino Acid Sequence
DIQMTQSPSSLSASVGDRVTITCQASQDITNYLNWYQQKPGKAPKLLIYDASNLETGVPSRFSGSGSGTDFTFTISSLQPEDIATYYCQQSSNFPLTFGGGTKVEIK

SEQ ID NO: 194 - DNA, 321 bp, Artificial sequence
  BIIB-9-475 VL Nucleic Acid Sequence
gacatccagatgacccagtctccatcctccctgtctgcatctgtaggagacagagtcaccatcacttgccaggcgagtcaggacattaccaactatttaaattggtatcagcagaaaccagggaaagcccctaagctcctgatctacgatgcatccaatttggaaacaggggtcccatcaaggttcagtggaagtggatctgggacagattttactttcaccatcagcagcctgcagcctgaagatattgcaacatattactgtcagcagtcctccaatttccctctcacttttggcggagggaccaaggttgagatcaaa

SEQ ID NO: 195 - protein, 107 aa, Artificial sequence
  BIIB-9-477 VL Amino Acid Sequence
EIVMTQSPATLSVSPGERATLSCRASQSVSSSLAWYQQKPGQAPRLLIFGASTRATGIPARFSGSGSGTEFTLTISSLQSEDFAVYYCQQDVNWPITFGGGTKVEIK

SEQ ID NO: 196 - DNA, 321 bp, Artificial sequence
  BIIB-9-477 VL Nucleic Acid Sequence
gaaatagtgatgacgcagtctccagccaccctgtctgtgtctccaggggaaagagccaccctctcctgcagggccagtcagagtgttagcagcagcttagcctggtaccagcagaaacctggccaggctcccaggctcctcatctttggtgcatccaccagggccactggtatcccagccaggttcagtggcagtgggtctgggacagagttcactctcaccatcagcagcctgcagtctgaagattttgcagtttattactgtcagcaggacgtcaattggcctatcacttttggcggagggaccaaggttgagatcaaa

SEQ ID NO: 197 - protein, 107 aa, Artificial sequence
  BIIB-9-479 VL Amino Acid Sequence
DIQMTQSPSTLSASVGDRVTITCRASQSISSWLAWYQQKPGKAPKLLIYKASSLESGVPSRFSGSGSGTEFTLTISSLQPDDFATYYCQQYRILSPTFGGGTKVEIK

SEQ ID NO: 198 - DNA, 321 bp, Artificial sequence
  BIIB-9-479 VL Nucleic Acid Sequence
gacatccagatgacccagtctccttccaccctgtctgcatctgtaggagacagagtcaccatcacttgccgggccagtcagagtattagtagctggttggcctggtatcagcagaaaccagggaaagcccctaagctcctgatctataaagcctccagtttggaaagtggggtcccatcaaggttcagcggcagtggatctgggacagaattcactctcaccatcagcagcctgcagcctgatgattttgcaacttattactgccagcagtaccgcatcctctctcctacttttggcggagggaccaaggttgagatcaaa

SEQ ID NO: 199 - protein, 112 aa, Artificial sequence
  BIIB-9-480 VL Amino Acid Sequence
DIVMTQSPLSLPVTPGEPASISCRSSQSLLYSNGYNYLDWYLQKPGQSPQLLIYLGSNRASGVPDRFSGSGSGTDFTLKISRVEAEDVGVYYCMQARQPPWTFGGGTKVEIK

SEQ ID NO: 200 - DNA, 336 bp, Artificial sequence
  BIIB-9-480 VL Nucleic Acid Sequence
gatattgtgatgactcagtctccactctccctgcccgtcacccctggagagccggcctccatctcctgcaggtctagtcagagcctcctgtatagtaatggatacaactatttggattggtacctgcagaagccagggcagtctccacagctcctgatctatttgggttctaatcgggcctccggggtccctgacaggttcagtggcagtggatcaggcacagattttacactgaaaatcagcagagtggaggctgaggatgttggggtttattactgcatgcaggcacgacagcccccttggacttttggcggagggaccaaggttgagatcaaa

SEQ ID NO: 201 - protein, 107 aa, Artificial sequence
  BIIB-9-558 VL Amino Acid Sequence
DIQMTQSPSTLSASVGDRVTITCRASQSIGSWLAWYQQKPGKAPKLLIYKASSLESGVPSRFSGSGSGTEFTLTISSLQPDDFATYYCQQAGSYSFTFGGGTKVEIK

SEQ ID NO: 202 - DNA, 321 bp, Artificial sequence
  BIIB-9-558 VL Nucleic Acid Sequence
gacatccagatgacccagtctccttccaccctgtctgcatctgtaggagacagagtcaccatcacttgccgggccagtcagagtattggtagctggttggcctggtatcagcagaaaccagggaaagcccctaagctcctgatctataaagcctccagtttggaaagtggggtcccatcaaggttcagcggcagtggatctgggacagaattcactctcaccatcagcagcctgcagcctgatgattttgcaacttattactgccagcaggccggaagctactctttcacttttggcggagggaccaaggttgagatcaaa

SEQ ID NO: 203 - protein, 107 aa, Artificial sequence
  BIIB-9-414 VL Amino Acid Sequence
DIQMTQSPSSVSASVGDRVTITCRASQGISSWLAWYQQKPGKAPKLLIYAASSLQSGVPSRFSGSGSGTDFTLTISSLQPEDFATYYCQQGDVFPFTFGGGTKVEIK

SEQ ID NO: 204 - DNA, 321 bp, Artificial sequence
  BIIB-9-414 VL Nucleic Acid Sequence
gacatccagatgacccagtctccatcttccgtgtctgcatctgtaggagacagagtcaccatcacttgtcgggcgagtcagggtattagcagctggttagcctggtatcagcagaaaccagggaaagcccctaagctcctgatctatgctgcatccagtttgcaaagtggggtcccatcaaggttcagcggcagtggatctgggacagatttcactctcaccatcagcagcctgcagcctgaagattttgcaacttattactgtcagcagggagacgtcttccctttcacttttggcggagggaccaaggttgagatcaaa

SEQ ID NO: 205 - protein, 107 aa, Artificial sequence
  BIIB-9-415 VL Amino Acid Sequence
DIQMTQSPSSVSASVGDRVTITCRASQGIDSWLAWYQQKPGKAPKLLIYAASSLQSGVPSRFSGSGSGTDFTLTISSLQPEDFATYYCQQGDAFPFTFGGGTKVEIK

SEQ ID NO: 206 - DNA, 321 bp, Artificial sequence
  BIIB-9-415 VL Nucleic Acid Sequence
gacatccagatgacccagtctccatcttccgtgtctgcatctgtaggagacagagtcaccatcacttgtcgggcgagtcagggtattgacagctggttagcctggtatcagcagaaaccagggaaagcccctaagctcctgatctatgctgcatccagtttgcaaagtggggtcccatcaaggttcagcggcagtggatctgggacagatttcactctcaccatcagcagcctgcagcctgaagattttgcaacttattactgtcagcagggagacgccttccctttcacttttggcggagggaccaaggttgagatcaaa

SEQ ID NO: 207 - protein, 108 aa, Artificial sequence
  BIIB-9-425 VL Amino Acid Sequence
EIVLTQSPGTLSLSPGERATLSCRASQSVSSDYLAWYQQKPGQAPRLLIYGASSRATGIPDRFSGSGSGTDFTLTISRLEPEDFAVYYCQQYDSHPYTFGGGTKVEIK

SEQ ID NO: 208 - DNA, 324 bp, Artificial sequence
  BIIB-9-425 VL Nucleic Acid Sequence
gaaattgtgttgacgcagtctccaggcaccctgtctttgtctccaggggaaagagccaccctctcctgcagggccagtcagagtgttagcagcgactacttagcctggtaccagcagaaacctggccaggctcccaggctcctcatctatggtgcatccagcagggccactggcatcccagacaggttcagtggcagtgggtctgggacagacttcactctcaccatcagcagactggagcctgaagattttgcagtgtattactgtcagcagtacgacagtcacccttacacttttggcggagggaccaaggttgagatcaaa

SEQ ID NO: 209 - protein, 113 aa, Artificial sequence
  BIIB-9-440 VL Amino Acid Sequence
DIVMTQSPDSLAVSLGERATINCKSSQSVLYSSNNKNYLAWYQQKPGQPPKLLIYWASTRESGVPDRFSGSGSGTDFTLTISSLQAEDVAVYYCQQYALDPPTFGGGTKVEIK

SEQ ID NO: 210 - DNA, 339 bp, Artificial sequence
  BIIB-9-440 VL Nucleic Acid Sequence
gacatcgtgatgacccagtctccagactccctggctgtgtctctgggcgagagggccaccatcaactgcaagtccagccagagtgttttatacagctccaacaataagaactacttagcttggtaccagcagaaaccaggacagcctcctaagctgctcatttactgggcatctacccgggaatccggggtccctgaccgattcagtggcagcgggtctgggacagatttcactctcaccatcagcagcctgcaggctgaagatgtggcagtttattactgtcagcagtacgccctcgaccctcctacttttggcggagggaccaaggttgagatcaaa

SEQ ID NO: 211 - protein, 107 aa, Artificial sequence
  BIIB-9-452 VL Amino Acid Sequence
EIVMTQSPATLSVSPGERATLSCRASQSVSSNLAWYQQKPGQAPRLLIYGASTRATGIPARFSGSGSGTEFTLTISSLQSEDFAVYYCQQANNFPFTFGGGTKVEIK

SEQ ID NO: 212 - DNA, 321 bp, Artificial sequence
  BIIB-9-452 VL Nucleic Acid Sequence
gaaatagtgatgacgcagtctccagccaccctgtctgtgtctccaggggaaagagccaccctctcctgcagggccagtcagagtgttagcagcaacttagcctggtaccagcagaaacctggccaggctcccaggctcctcatctatggtgcatccaccagggccactggtatcccagccaggttcagtggcagtgggtctgggacagagttcactctcaccatcagcagcctgcagtctgaagattttgcagtttattactgtcagcaggccaataatttccctttcacttttggcggagggaccaaggttgagatcaaa

SEQ ID NO: 213 - protein, 107 aa, Artificial sequence
  BIIB-9-460 VL Amino Acid Sequence
EIVMTQSPATLSVSPGERATLSCRASQSVSSNLAWYQQKPGQAPRLLIYGASTRATGIPARFSGSGSGTEFTLTISSLQSEDFAVYYCQQHDNFPFTFGGGTKVEIK

SEQ ID NO: 214 - DNA, 321 bp, Artificial sequence
  BIIB-9-460 VL Nucleic Acid Sequence
gaaatagtgatgacgcagtctccagccaccctgtctgtgtctccaggggaaagagccaccctctcctgcagggccagtcagagtgttagcagcaacttagcctggtaccagcagaaacctggccaggctcccaggctcctcatctatggtgcatccaccagggccactggtatcccagccaggttcagtggcagtgggtctgggacagagttcactctcaccatcagcagcctgcagtctgaagattttgcagtttattactgtcagcagcacgacaatttccctttcacttttggcggagggaccaaggttgagatcaaa

SEQ ID NO: 215 - protein, 107 aa, Artificial sequence
  BIIB-9-461 VL Amino Acid Sequence
EIVMTQSPATLSVSPGERATLSCRASQSVSSSLAWYQQKPGQAPRLLIYGASTRATGIPARFSGSGSGTEFTLTISSLQSEDFAVYYCQQHHHWPPTFGGGTKVEIK

SEQ ID NO: 216 - DNA, 321 bp, Artificial sequence
  BIIB-9-461 VL Nucleic Acid Sequence
gaaatagtgatgacgcagtctccagccaccctgtctgtgtctccaggggaaagagccaccctctcctgcagggccagtcagagtgttagcagcagcttagcctggtaccagcagaaacctggccaggctcccaggctcctcatctatggtgcatccaccagggccactggtatcccagccaggttcagtggcagtgggtctgggacagagttcactctcaccatcagcagcctgcagtctgaagattttgcagtttattactgtcagcagcaccaccactggcctcctacttttggcggagggaccaaggttgagatcaaa

SEQ ID NO: 217 - protein, 107 aa, Artificial sequence
  BIIB-9-465 VL Amino Acid Sequence
DIQMTQSPSTLSASVGDRVTITCRASQSINSWLAWYQQKPGKAPKLLISDASSLESGVPSRFSGSGSGTEFTLTISSLQPDDFATYYCQQYEIFPFTFGGGTKVEIK

SEQ ID NO: 218 - DNA, 321 bp, Artificial sequence
  BIIB-9-465 VL Nucleic Acid Sequence
gacatccagatgacccagtctccttccaccctgtctgcatctgtaggagacagagtcaccatcacttgccgggccagtcagagtattaatagctggttggcctggtatcagcagaaaccagggaaagcccctaagctcctgatctccgatgcctccagtttggaaagtggggtcccatcaaggttcagcggcagtggatctgggacagaattcactctcaccatcagcagcctgcagcctgatgattttgcaacttattactgccagcagtacgaaatcttccctttcacttttggcggagggaccaaggttgagatcaaa

SEQ ID NO: 219 - protein, 107 aa, Artificial sequence
  BIB-4-564 VL Amino Acid Sequence
DIQMTQSPSSLSASVGDRVTITCRASQSISSYLNWYQQKPGKAPKLLIYAASSLQSGVPSRFSGSGSGTDFTLTISSLQPEDFATYYCQQSVAVPPTFGGGTKVEIK

SEQ ID NO: 220 - DNA, 321 bp, Artificial sequence
  BIIB-9-564 VL Nucleic Acid Sequence
gacatccagatgacccagtctccatcctccctgtctgcatctgtaggagacagagtcaccatcacttgccgggcaagtcagagcattagcagctatttaaattggtatcagcagaaaccagggaaagcccctaagctcctgatctatgctgcatccagtttgcaaagtggggtcccatcaaggttcagtggcagtggatctgggacagatttcactctcaccatcagcagtctgcaacctgaagattttgcaacttactactgtcagcaaagcgtcgccgtccctcctacttttggcggagggaccaaggttgagatcaaa

SEQ ID NO: 221 - protein, 107 aa, Artificial sequence
  BIIB-9-484 VL Amino Acid Sequence
DIQMTQSPSSLSASVGDRVTITCQASQDIANYLNWYQQKPGKAPKLLIYDASNLETGVPSRFSGSGSGTDFTFTISSLQPEDIATYYCQQYANFPYTFGGGTKVEIK

SEQ ID NO: 222 - DNA, 321 bp, Artificial sequence
  BIIB-9-484 VL Nucleic Acid Sequence
gacatccagatgacccagtctccatcctccctgtctgcatctgtaggagacagagtcaccatcacttgccaggcgagtcaggacattgccaactatttaaattggtatcagcagaaaccagggaaagcccctaagctcctgatctacgatgcatccaatttggaaacaggggtcccatcaaggttcagtggaagtggatctgggacagattttactttcaccatcagcagcctgcagcctgaagatattgcaacatattactgtcagcagtacgccaacttcccttacacttttggcggagggaccaaggttgagatcaaa

SEQ ID NO: 223 - protein, 107 aa, Artificial sequence
  BIIB-9-469 VL Amino Acid Sequence
EIVMTQSPATLSVSPGERATLSCRASQSVSSNLAWYQQKPGQAPRLLIFGASTRATGIPARFSGSGSGTEFTLTISSLQSEDFAVYYCQQSNNFPFTFGGGTKVEIK

SEQ ID NO: 224 - DNA, 321 bp, Artificial sequence
  BIIB-9-469 VL Nucleic Acid Sequence
gaaatagtgatgacgcagtctccagccaccctgtctgtgtctccaggggaaagagccaccctctcctgcagggccagtcagagtgttagcagcaacttagcctggtaccagcagaaacctggccaggctcccaggctcctcatctttggtgcatccaccagggccactggtatcccagccaggttcagtggcagtgggtctgggacagagttcactctcaccatcagcagcctgcagtctgaagattttgcagtttattactgtcagcagtccaataatttccctttcacttttggcggagggaccaaggttgagatcaaa

SEQ ID NO: 225 - protein, 107 aa, Artificial sequence
  BIIB-9-566 VL Amino Acid Sequence
EIVMTQSPATLSVSPGERATLSCRASQSVSSSLAWYQQKPGQAPRLLIYGASTRATGIPARFSGSGSGTEFTLTISSLQSEDFAVYYCQQHDNWPPTFGGGTKVEIK

SEQ ID NO: 226 - DNA, 321 bp, Artificial sequence
  BIIB-9-566 VL Nucleic Acid Sequence
gaaatagtgatgacgcagtctccagccaccctgtctgtgtctccaggggaaagagccaccctctcctgcagggccagtcagagtgttagcagcagcttagcctggtaccagcagaaacctggccaggctcccaggctcctcatctatggtgcatccaccagggccactggtatcccagccaggttcagtggcagtgggtctgggacagagttcactctcaccatcagcagcctgcagtctgaagattttgcagtttattactgtcagcagcacgacaattggcctcctacttttggcggagggaccaaggttgagatcaaa

SEQ ID NO: 227 - protein, 107 aa, Artificial sequence
  BIIB-9-567 VL Amino Acid Sequence
DIQMTQSPSTLSASVGDRVTITCRASQSISSWLAWYQQKPGKAPKLLIYDASSLESGVPSRFSGSGSGTEFTLTISSLQPDDFATYYCQQYRIYSPTFGGGTKVEIK

SEQ ID NO: 228 - DNA, 321 bp, Artificial sequence
  BIIB-9-567 VL Nucleic Acid Sequence
gacatccagatgacccagtctccttccaccctgtctgcatctgtaggagacagagtcaccatcacttgccgggccagtcagagtattagtagctggttggcctggtatcagcagaaaccagggaaagcccctaagctcctgatctatgatgcctccagtttggaaagtggggtcccatcaaggttcagcggcagtggatctgggacagaattcactctcaccatcagcagcctgcagcctgatgattttgcaacttattactgccagcagtacagaatctactctcctacttttggcggagggaccaaggttgagatcaaa

SEQ ID NO: 229 - protein, 107 aa, Artificial sequence
  BIIB-9-569 VL Amino Acid Sequence
DIQMTQSPSSLSASVGDRVTITCQASQDISNYLNWYQQKPGKAPKLLIYDASNLATGVPSRFSGSGSGTDFTFTISSLQPEDIATYYCQQADDFPFTFGGGTKVEIK

SEQ ID NO: 230 - DNA, 321 bp, Artificial sequence
  BIIB-9-569 VL Nucleic Acid Sequence
gacatccagatgacccagtctccatcctccctgtctgcatctgtaggagacagagtcaccatcacttgccaggcgagtcaggacattagcaactatttaaattggtatcagcagaaaccagggaaagcccctaagctcctgatctacgatgcatccaatttggcaacaggggtcccatcaaggttcagtggaagtggatctgggacagattttactttcaccatcagcagcctgcagcctgaagatattgcaacatattactgtcagcaggccgatgacttccctttcacttttggcggagggaccaaggttgagatcaaa

SEQ ID NO: 231 - protein, 107 aa, Artificial sequence
  BIIB-9-588 VL Amino Acid Sequence
EIVMTQSPATLSVSPGERATLSCRASQSVSSNLAWYQQKPGQAPRLLIYGASTRATGIPARFSGSGSGTEFTLTISSLQSEDFAVYYCQQAYNWPFTFGGGTKVEIK

SEQ ID NO: 232 - DNA, 321 bp, Artificial sequence
  BIIB-9-588 VL Nucleic Acid Sequence
gaaatagtgatgacgcagtctccagccaccctgtctgtgtctccaggggaaagagccaccctctcctgcagggccagtcagagtgttagcagcaacttagcctggtaccagcagaaacctggccaggctcccaggctcctcatctatggtgcatccaccagggccactggtatcccagccaggttcagtggcagtgggtctgggacagagttcactctcaccatcagcagcctgcagtctgaagattttgcagtttattactgtcagcaggcctacaattggcctttcacttttggcggagggaccaaggttgagatcaaa

SEQ ID NO: 233 - protein, 107 aa, Artificial sequence
  BIIB-9-611 VL Amino Acid Sequence
EIVMTQSPATLSVSPGERATLSCRASQSVSSNLAWYQQKPGQAPRLLIYGASTRATGIPARFSGSGSGTEFTLTISSLQSEDFAVYYCQQDNIHPYTFGGGTKVEIK

SEQ ID NO: 234 - DNA, 321 bp, Artificial sequence
  BIIB-9-611 VL Nucleic Acid Sequence
gaaatagtgatgacgcagtctccagccaccctgtctgtgtctccaggggaaagagccaccctctcctgcagggccagtcagagtgttagcagcaacttagcctggtaccagcagaaacctggccaggctcccaggctcctcatctatggtgcatccaccagggccactggtatcccagccaggttcagtggcagtgggtctgggacagagttcactctcaccatcagcagcctgcagtctgaagattttgcagtttattactgtcagcaggacaatatccacccttacacttttggcggagggaccaaggttgagatcaaa

SEQ ID NO: 235 - protein, 107 aa, Artificial sequence
  BIIB-9-619 VL Amino Acid Sequence
EIVLTQSPATLSLSPGERATLSCRASQSVSSYLAWYQQKPGQAPRLLIYDASNRATGIPARFSGSGSGTDFTLTISSLEPEDFAVYYCQQRDNWPFTFGGGTKVEIK

SEQ ID NO: 236 - DNA, 321 bp, Artificial sequence
  BIIB-9-619 VL Nucleic Acid Sequence
gaaattgtgttgacacagtctccagccaccctgtctttgtctccaggggaaagagccaccctctcctgcagggccagtcagagtgttagcagctacttagcctggtaccaacagaaacctggccaggctcccaggctcctcatctatgatgcatccaacagggccactggcatcccagccaggttcagtggcagtgggtctgggacagacttcactctcaccatcagcagcctagagcctgaagattttgcagtttattactgtcagcagagagacaactggcctttcacttttggcggagggaccaaggttgagatcaaa

SEQ ID NO: 237 - protein, 108 aa, Artificial sequence
  BIIB-9-626 VL Amino Acid Sequence
DIQMTQSPSTLSASVGDRVTITCRASQSISSWLAWYQQKPGKAPKLLIYKASSLESGVPSRFSGSGSGTEFTLTISSLQPDDFATYYCQQDGSYPPLTFGGGTKVEIK

SEQ ID NO: 238 - DNA, 324 bp, Artificial sequence
  BIIB-9-626 VL Nucleic Acid Sequence
gacatccagatgacccagtctccttccaccctgtctgcatctgtaggagacagagtcaccatcacttgccgggccagtcagagtattagtagctggttggcctggtatcagcagaaaccagggaaagcccctaagctcctgatctataaagcctccagtttggaaagtggggtcccatcaaggttcagcggcagtggatctgggacagaattcactctcaccatcagcagcctgcagcctgatgattttgcaacttattactgccagcaggacggaagttaccctcctctcacttttggcggagggaccaaggttgagatcaaa

SEQ ID NO: 239 - protein, 107 aa, Artificial sequence
  BIIB-9-883 VL Amino Acid Sequence
DIQMTQSPSSLSASVGDRVTITCQASQDITNYLNWYQQKPGKAPKLLIYDASNLETGVPSRFSGSGSGTDFTFTISSLQPEDIATYYCQQADHFPFTFGGGTKVEIK

SEQ ID NO: 240 - DNA, 321 bp, Artificial sequence
  BIIB-9-883 VL Nucleic Acid Sequence
gacatccagatgacccagtctccatcctccctgtctgcatctgtaggagacagagtcaccatcacttgccaggcgagtcaggacattaccaactatttaaattggtatcagcagaaaccagggaaagcccctaagctcctgatctacgatgcatccaatttggaaacaggggtcccatcaaggttcagtggaagtggatctgggacagattttactttcaccatcagcagcctgcagcctgaagatattgcaacatattactgtcagcaggccgatcacttccctttcacttttggcggagggaccaaggttgagatcaaa

SEQ ID NO: 241 - protein, 107 aa, Artificial sequence
  BIIB-9-419 VL Amino Acid Sequence
EIVMTQSPATLSLSPGERATLSCRASQSVSSYLAWYQQKPGQAPRLLIYDSSNRATGIPARFSGSGSGTDFTLTISSLEPEDFAVYYCQQVSTHPYTFGGGTKVEIK

SEQ ID NO: 242 - DNA, 321 bp, Artificial sequence
  BIIB-9-419 VL Nucleic Acid Sequence
gaaattgtgatgacacagtctccagccaccctgtctttgtctccaggggaaagagccaccctctcctgcagggccagtcagagtgttagcagctacttagcctggtaccaacagaaacctggccaggctcccaggctcctcatctatgattcatccaacagggccactggcatcccagccaggttcagtggcagtgggtctgggacagacttcactctcaccatcagcagcctagagcctgaagattttgcagtttattactgtcagcaggtcagtacccacccttacacttttggcggagggaccaaggttgagatcaaa

SEQ ID NO: 243 - protein, 113 aa, Artificial sequence
  BIIB-9-451 VL Amino Acid Sequence
DIVMTQSPDSLAVSLGERATINCKSSQSVLYSSNNKNYLAWYQQKPGQPPKLLIYWASTRESGVPDRFSGSGSGTDFTLTISSLQAEDVAVYYCQQYYFPPWTFGGGTKVEIK

SEQ ID NO: 244 - DNA, 339 bp, Artificial sequence
  BIIB-9-451 VL Nucleic Acid Sequence
gacatcgtgatgacccagtctccagactccctggctgtgtctctgggcgagagggccaccatcaactgcaagtccagccagagtgttttatacagctccaacaataagaactacttagcttggtaccagcagaaaccaggacagcctcctaagctgctcatttactgggcatctacccgggaatccggggtccctgaccgattcagtggcagcgggtctgggacagatttcactctcaccatcagcagcctgcaggctgaagatgtggcagtttattactgtcagcagtactacttccccccttggacttttggcggagggaccaaggttgagatcaaa

SEQ ID NO: 245 - protein, 107 aa, Artificial sequence
  BIIB-9-473 VL Amino Acid Sequence
EIVLTQSPATLSLSPGERATLSCRASQSVSSYLAWYQQKPGQAPRLLIYDASNRATGIPARFSGSGSGTDFTLTISSLEPEDFAVYYCQQRSFLPYTFGGGTKVEIK

SEQ ID NO: 246 - DNA, 321 bp, Artificial sequence
  BIIB-9-473 VL Nucleic Acid Sequence
gaaattgtgttgacacagtctccagccaccctgtctttgtctccaggggaaagagccaccctctcctgcagggccagtcagagtgttagcagctacttagcctggtaccaacagaaacctggccaggctcccaggctcctcatctatgatgcatccaacagggccactggcatcccagccaggttcagtggcagtgggtctgggacagacttcactctcaccatcagcagcctagagcctgaagattttgcagtttattactgtcagcagagaagtttcctcccttacacttttggcggagggaccaaggttgagatcaaa

SEQ ID NO: 247 - protein, 107 aa, Artificial sequence
  BIIB-9-565 VL Amino Acid Sequence
EIVLTQSPATLSLSPGERATLSCRASQSVSSYLAWYQQKPGQAPRLLIYDASNRATGIPARFSGSGSGTDFTLTISSLEPEDFAVYYCQQDSNLPFTFGGGTKVEIK

SEQ ID NO: 248 - DNA, 321 bp, Artificial sequence
  BIIB-9-565 VL Nucleic Acid Sequence
gaaattgtgttgacacagtctccagccaccctgtctttgtctccaggggaaagagccaccctctcctgcagggccagtcagagtgttagcagctacttagcctggtaccaacagaaacctggccaggctcccaggctcctcatctatgatgcatccaacagggccactggcatcccagccaggttcagtggcagtgggtctgggacagacttcactctcaccatcagcagcctagagcctgaagattttgcagtttattactgtcagcaggacagtaatctccctttcacttttggcggagggaccaaggttgagatcaaa

SEQ ID NO: 249 - protein, 108 aa, Artificial sequence
  BIIB-9-573 VL Amino Acid Sequence
EIVLTQSPGTLSLSPGERATLSCRASQSVSSSFLAWYQQKPGQAPRLLIYGASSRATGIPDRFSGSGSGTDFTLTISRLEPEDFAVYYCQQSHSPPYTFGGGTKVEIK

SEQ ID NO: 250 - DNA, 324 bp, Artificial sequence
  BIIB-9-573 VL Nucleic Acid Sequence
gaaattgtgttgacgcagtctccaggcaccctgtctttgtctccaggggaaagagccaccctctcctgcagggccagtcagagtgttagcagcagcttcttagcctggtaccagcagaaacctggccaggctcccaggctcctcatctatggtgcatccagcagggccactggcatcccagacaggttcagtggcagtgggtctgggacagacttcactctcaccatcagcagactggagcctgaagattttgcagtgtattactgtcagcagtcccacagtcccccttacacttttggcggagggaccaaggttgagatcaaa

SEQ ID NO: 251 - protein, 107 aa, Artificial sequence
  BIIB-9-579 VL Amino Acid Sequence
DIQMTQSPSSLSASVGDRVTITCRASQSISSYLNWYQQKPGKAPKLLIYGASSLQSGVPSRFSGSGSGTDFTLTISSLQPEDFATYYCQQAFSFPFTFGGGTKVEIK

SEQ ID NO: 252 - DNA, 321 bp, Artificial sequence
  BIIB-9-579 VL Nucleic Acid Sequence
gacatccagatgacccagtctccatcctccctgtctgcatctgtaggagacagagtcaccatcacttgccgggcaagtcagagcattagcagctatttaaattggtatcagcagaaaccagggaaagcccctaagctcctgatctatggtgcatccagtttgcaaagtggggtcccatcaaggttcagtggcagtggatctgggacagatttcactctcaccatcagcagtctgcaacctgaagattttgcaacttactactgtcagcaagcattcagtttccctttcacttttggcggagggaccaaggttgagatcaaa

SEQ ID NO: 253 - protein, 107 aa, Artificial sequence
  BIIB-9-581 VL Amino Acid Sequence
DIQMTQSPSSLSASVGDRVTITCRASQSISSYLNWYQQKPGKAPKLLIYAASSLQSGVPSRFSGSGSGTDFTLTISSLQPEDFATYYCQQSDLFPFTFGGGTKVEIK

SEQ ID NO: 254 - DNA, 321 bp, Artificial sequence
  BIIB-9-581 VL Nucleic Acid Sequence
gacatccagatgacccagtctccatcctccctgtctgcatctgtaggagacagagtcaccatcacttgccgggcaagtcagagcattagcagctatttaaattggtatcagcagaaaccagggaaagcccctaagctcctgatctatgctgcatccagtttgcaaagtggggtcccatcaaggttcagtggcagtggatctgggacagatttcactctcaccatcagcagtctgcaacctgaagattttgcaacttactactgtcagcaaagcgacctcttccctttcacttttggcggagggaccaaggttgagatcaaa

SEQ ID NO: 255 - protein, 107 aa, Artificial sequence
  BIIB-9-582 VL Amino Acid Sequence
DIQMTQSPSSLSASVGDRVTITCQASQDISNYLNWYQQKPGKAPKLLIYDASNLETGVPSRFSGSGSGTDFTFTISSLQPEDIATYYCQQADILPPTFGGGTKVEIK

SEQ ID NO: 256 - DNA, 321 bp, Artificial sequence
  BIIB-9-582 VL Nucleic Acid Sequence
gacatccagatgacccagtctccatcctccctgtctgcatctgtaggagacagagtcaccatcacttgccaggcgagtcaggacattagcaactatttaaattggtatcagcagaaaccagggaaagcccctaagctcctgatctacgatgcatccaatttggaaacaggggtcccatcaaggttcagtggaagtggatctgggacagattttactttcaccatcagcagcctgcagcctgaagatattgcaacatattactgtcagcaggccgatatcctccctcctacttttggcggagggaccaaggttgagatcaaa

SEQ ID NO: 257 - protein, 107 aa, Artificial sequence
  BIIB-9-585 VL Amino Acid Sequence
DIQMTQSPSSVSASVGDRVTITCRASQGISSWLAWYQQKPGKAPKLLIYAASSLQSGVPSRFSGSGSGTDFTLTISSLQPEDFATYYCQQANSYPITFGGGTKVEIK

SEQ ID NO: 258 - DNA, 321 bp, Artificial sequence
  BIIB-9-585 VL Nucleic Acid Sequence
gacatccagatgacccagtctccatcttccgtgtctgcatctgtaggagacagagtcaccatcacttgtcgggcgagtcagggtattagcagctggttagcctggtatcagcagaaaccagggaaagcccctaagctcctgatctatgctgcatccagtttgcaaagtggggtcccatcaaggttcagcggcagtggatctgggacagatttcactctcaccatcagcagcctgcagcctgaagattttgcaacttattactgtcagcaggcaaatagttaccctatcacttttggcggagggaccaaggttgagatcaaa

SEQ ID NO: 259 - protein, 107 aa, Artificial sequence
  BIIB-9-587 VL Amino Acid Sequence
DIQMTQSPSSVSASVGDRVTITCRASQGISSWLAWYQQKPGKAPKLLIYAASSLQSGVPSRFSGSGSGTDFTLTISSLQPEDFATYYCQQADSFPFTFGGGTKVEIK

SEQ ID NO: 260 - DNA, 321 bp, Artificial sequence
  BIIB-9-587 VL Nucleic Acid Sequence
gacatccagatgacccagtctccatcttccgtgtctgcatctgtaggagacagagtcaccatcacttgtcgggcgagtcagggtattagcagctggttagcctggtatcagcagaaaccagggaaagcccctaagctcctgatctatgctgcatccagtttgcaaagtggggtcccatcaaggttcagcggcagtggatctgggacagatttcactctcaccatcagcagcctgcagcctgaagattttgcaacttattactgtcagcaggcagacagtttccctttcacttttggcggagggaccaaggttgagatcaaa

SEQ ID NO: 261 - protein, 107 aa, Artificial sequence
  BIIB-9-590 VL Amino Acid Sequence
EIVLTQSPATLSLSPGERATLSCRASQSVSSYLAWYQQKPGQAPRLLIYDASNRATGIPARFSGSGSGTDFTLTISSLEPEDFAVYYCQQVDNFPLTFGGGTKVEIK

SEQ ID NO: 262 - DNA, 321 bp, Artificial sequence
  BIIB-9-590 VL Nucleic Acid Sequence
gaaattgtgttgacacagtctccagccaccctgtctttgtctccaggggaaagagccaccctctcctgcagggccagtcagagtgttagcagctacttagcctggtaccaacagaaacctggccaggctcccaggctcctcatctatgatgcatccaacagggccactggcatcccagccaggttcagtggcagtgggtctgggacagacttcactctcaccatcagcagcctagagcctgaagattttgcagtttattactgtcagcaggtcgacaatttccctctcacttttggcggagggaccaaggttgagatcaaa

SEQ ID NO: 263 - protein, 107 aa, Artificial sequence
  BIIB-9-592 VL Amino Acid Sequence
DIQMTQSPSSLSASVGDRVTITCRASQSISSYLNWYQQKPGKAPKLLIYAASSLQSGVPSRFSGSGSGTDFTLTISSLQPEDFATYYCQQPYDTPITFGGGTKVEIK

SEQ ID NO: 264 - DNA, 321 bp, Artificial sequence
  BIIB-9-592 VL Nucleic Acid Sequence
gacatccagatgacccagtctccatcctccctgtctgcatctgtaggagacagagtcaccatcacttgccgggcaagtcagagcattagcagctatttaaattggtatcagcagaaaccagggaaagcccctaagctcctgatctatgctgcatccagtttgcaaagtggggtcccatcaaggttcagtggcagtggatctgggacagatttcactctcaccatcagcagtctgcaacctgaagattttgcaacttactactgtcagcaaccatacgacactcctatcacttttggcggagggaccaaggttgagatcaaa

SEQ ID NO: 265 - protein, 107 aa, Artificial sequence
  BIIB-9-606 VL Amino Acid Sequence
DIQMTQSPSSLSASVGDRVTITCQASQDISNYLNWYQQKPGKAPKLLIYDASNLETGVPSRFSGSGSGTDFTFTISSLQPEDIATYYCQQSDLFPFTFGGGTKVEIK

SEQ ID NO: 266 - DNA, 321 bp, Artificial sequence
  BIIB-9-606 VL Nucleic Acid Sequence
gacatccagatgacccagtctccatcctccctgtctgcatctgtaggagacagagtcaccatcacttgccaggcgagtcaggacattagcaactatttaaattggtatcagcagaaaccagggaaagcccctaagctcctgatctacgatgcatccaatttggaaacaggggtcccatcaaggttcagtggaagtggatctgggacagattttactttcaccatcagcagcctgcagcctgaagatattgcaacatattactgtcagcagtccgatctcttccctttcacttttggcggagggaccaaggttgagatcaaa

SEQ ID NO: 267 - protein, 112 aa, Artificial sequence
  BIIB-9-608 VL Amino Acid Sequence
DIVMTQSPDSLAVSLGERATINCKSSQSVLYSSNNKNYLAWYQQKPGQPPKLLIYWASTRESGVPDRFSGSGSGTDFTLTISSLQAEDVAVYYCQQFLYTPTFGGGTKVEIK

SEQ ID NO: 268 - DNA, 336 bp, Artificial sequence
  BIIB-9-608 VL Nucleic Acid Sequence
gacatcgtgatgacccagtctccagactccctggctgtgtctctgggcgagagggccaccatcaactgcaagtccagccagagtgttttatacagctccaacaataagaactacttagcttggtaccagcagaaaccaggacagcctcctaagctgctcatttactgggcatctacccgggaatccggggtccctgaccgattcagtggcagcgggtctgggacagatttcactctcaccatcagcagcctgcaggctgaagatgtggcagtttattactgtcagcagttcctctacactcctacttttggcggagggaccaaggttgagatcaaa

SEQ ID NO: 269 - protein, 107 aa, Artificial sequence
  BIIB-9-616 VL Amino Acid Sequence
EIVMTQSPATLSVSPGERATLSCRASQSVSSSLAWYQQKPGQAPRLLIYGASTRATGIPARFSGSGSGTEFTLTISSLQSEDFAVYYCQQADNFPFTFGGGTKVEIK

SEQ ID NO: 270 - DNA, 321 bp, Artificial sequence
  BIIB-9-616 VL Nucleic Acid Sequence
gaaatagtgatgacgcagtctccagccaccctgtctgtgtctccaggggaaagagccaccctctcctgcagggccagtcagagtgttagcagcagcttagcctggtaccagcagaaacctggccaggctcccaggctcctcatctatggtgcatccaccagggccactggtatcccagccaggttcagtggcagtgggtctgggacagagttcactctcaccatcagcagcctgcagtctgaagattttgcagtttattactgtcagcaggccgacaatttccctttcacttttggcggagggaccaaggttgagatcaaa

SEQ ID NO: 271 - protein, 113 aa, Artificial sequence
  BIIB-9-621 VL Amino Acid Sequence
DIVMTQSPDSLAVSLGERATINCKSSQSVLYSSNNKNYLAWYQQKPGQPPKLLIYWASTRESGVPDRFSGSGSGTDFTLTISSLQAEDVAVYYCQQFYLPPWTFGGGTKVEIK

SEQ ID NO: 272 - DNA, 339 bp, Artificial sequence
  BIIB-9-621 VL Nucleic Acid Sequence
gacatcgtgatgacccagtctccagactccctggctgtgtctctgggcgagagggccaccatcaactgcaagtccagccagagtgttttatacagctccaacaataagaactacttagcttggtaccagcagaaaccaggacagcctcctaagctgctcatttactgggcatctacccgggaatccggggtccctgaccgattcagtggcagcgggtctgggacagatttcactctcaccatcagcagcctgcaggctgaagatgtggcagtttattactgtcagcagttctacctccccccttggacttttggcggagggaccaaggttgagatcaaa

SEQ ID NO: 273 - protein, 107 aa, Artificial sequence
  BIIB-9-622 VL Amino Acid Sequence
EIVMTQSPATLSVSPGERATLSCRASQSVSSSLAWYQQKPGQAPRLLIYGASTRATGIPARFSGSGSGTEFTLTISSLQSEDFAVYYCQQHSTWPPTFGGGTKVEIK

SEQ ID NO: 274 - DNA, 321 bp, Artificial sequence
  BIIB-9-622 VL Nucleic Acid Sequence
gaaatagtgatgacgcagtctccagccaccctgtctgtgtctccaggggaaagagccaccctctcctgcagggccagtcagagtgttagcagcagcttagcctggtaccagcagaaacctggccaggctcccaggctcctcatctatggtgcatccaccagggccactggtatcccagccaggttcagtggcagtgggtctgggacagagttcactctcaccatcagcagcctgcagtctgaagattttgcagtttattactgtcagcagcactccacctggcctcctacttttggcggagggaccaaggttgagatcaaa

SEQ ID NO: 275 - protein, 112 aa, Artificial sequence
  BIIB-9-627 VL Amino Acid Sequence
DIVMTQSPLSLPVTPGEPASISCRSSQSLLHSNGYNYLDWYLQKPGQSPQLLIYLGSNRASGVPDRFSGSGSGTDFTLKISRVEAEDVGVYYCMQARERPWTFGGGTKVEIK

SEQ ID NO: 276 - DNA, 336 bp, Artificial sequence
  BIIB-9-627 VL Nucleic Acid Sequence
gatattgtgatgactcagtctccactctccctgcccgtcacccctggagagccggcctccatctcctgcaggtctagtcagagcctcctgcatagtaatggatacaactatttggattggtacctgcagaagccagggcagtctccacagctcctgatctatttgggttctaatcgggcctccggggtccctgacaggttcagtggcagtggatcaggcacagattttacactgaaaatcagcagagtggaggctgaggatgttggggtttattactgcatgcaggcacgagaacgcccttggacttttggcggagggaccaaggttgagatcaaa

SEQ ID NO: 277 - protein, 108 aa, Artificial sequence
  BIIB-9-408 VL Amino Acid Sequence
EIVLTQSPATLSLSPGERATLSCRASQSVSSYLAWYQQKPGQAPRLLIYDASNRATGIPARFSGSGSGTDFTLTISSLEPEDFAVYYCQQAFVWPPITFGGGTKVEIK

SEQ ID NO: 278 - DNA, 324 bp, Artificial sequence
  BIIB-9-408 VL Nucleic Acid Sequence
gaaattgtgttgacacagtctccagccaccctgtctttgtctccaggggaaagagccaccctctcctgcagggccagtcagagtgttagcagctacttagcctggtaccaacagaaacctggccaggctcccaggctcctcatctatgatgcatccaacagggccactggcatcccagccaggttcagtggcagtgggtctgggacagacttcactctcaccatcagcagcctagagcctgaagattttgcagtttattactgtcagcaggccttcgtctggcctcctatcacttttggcggagggaccaaggttgagatcaaa

SEQ ID NO: 279 - protein, 107 aa, Artificial sequence
  BIIB-9-416 VL Amino Acid Sequence
EIVMTQSPATLSLSPGERATLSCRASQSVSSYLAWYQQKPGQAPRLLIYDSSNRATGIPARFSGSGSGTDFTLTISSLEPEDFAVYYCQQRVVWPPTFGGGTKVEIK

SEQ ID NO: 280 - DNA, 321 bp, Artificial sequence
  BIIB-9-416 VL Nucleic Acid Sequence
gaaattgtgatgacacagtctccagccaccctgtctttgtctccaggggaaagagccaccctctcctgcagggccagtcagagtgttagcagctacttagcctggtaccaacagaaacctggccaggctcccaggctcctcatctatgattcatccaacagggccactggcatcccagccaggttcagtggcagtgggtctgggacagacttcactctcaccatcagcagcctagagcctgaagattttgcagtttattactgtcagcagagagtcgtctggcctcctacttttggcggagggaccaaggttgagatcaaa

SEQ ID NO: 281 - protein, 107 aa, Artificial sequence
  BIIB-9-629 VL Amino Acid Sequence
DIQLTQSPSSLSASVGDRVTITCQASQDISNYLNWYQQKPGKAPKLLIYDASNLETGVPSRFSGSGSGTDFTFTISSLQPEDIATYYCQQLDSLPPTFGGGTKVEIK

SEQ ID NO: 282 - DNA, 321 bp, Artificial sequence
  BIIB-9-629 VL Nucleic Acid Sequence
gacatccagttgacccagtctccatcctccctgtctgcatctgtaggagacagagtcaccatcacttgccaggcgagtcaggacattagcaactatttaaattggtatcagcagaaaccagggaaagcccctaagctcctgatctacgatgcatccaatttggaaacaggggtcccatcaaggttcagtggaagtggatctgggacagattttactttcaccatcagcagcctgcagcctgaagatattgcaacatattactgtcagcagctcgattccctccctcctacttttggcggagggaccaaggttgagatcaaa

SEQ ID NO: 283 - protein, 107 aa, Artificial sequence
  BIIB-9-885 VL Amino Acid Sequence
EIVLTQSPATLSLSPGERATLSCRASQSVSSYLAWYQQKPGQAPRLLIYDASKRATGIPARFSGSGSGTDFTLTISSLEPEDFAVYYCQQRVIWPPTFGGGTKVEIK

SEQ ID NO: 284 - DNA, 321 bp, Artificial sequence
  BIIB-9-885 VL Nucleic Acid Sequence
gaaattgtgttgacacagtctccagccaccctgtctttgtctccaggggaaagagccaccctctcctgcagggccagtcagagtgttagcagctacttagcctggtaccaacagaaacctggccaggctcccaggctcctcatctatgatgcatccaaaagggccactggcatcccagccaggttcagtggcagtgggtctgggacagacttcactctcaccatcagcagcctagagcctgaagattttgcagtttattactgtcagcagagagtcatctggcctcctacttttggcggagggaccaaggttgagatcaaa

SEQ ID NO: 285 - protein, 107 aa, Artificial sequence
  BIIB-9-607 VL Amino Acid Sequence
DIQMTQSPSTLSASVGDRVTITCRASQSISSWLAWYQQKPGKAPKLLIYKASSLESGVPSRFSGSGSGTEFTLTISSLQPDDFATYYCQQAGRYPLTFGGGTKVEIK

SEQ ID NO: 286 - DNA, 321 bp, Artificial sequence
  BIIB-9-607 VL Nucleic Acid Sequence
gacatccagatgacccagtctccttccaccctgtctgcatctgtaggagacagagtcaccatcacttgccgggccagtcagagtattagtagctggttggcctggtatcagcagaaaccagggaaagcccctaagctcctgatctataaagcctccagtttggaaagtggggtcccatcaaggttcagcggcagtggatctgggacagaattcactctcaccatcagcagcctgcagcctgatgattttgcaacttattactgccagcaggccggacgctaccctctcacttttggcggagggaccaaggttgagatcaaa

SEQ ID NO: 287 - protein, 107 aa, Artificial sequence
  BIIB-9-471 VL Amino Acid Sequence
EIVLTQSPATLSLSPGERATLSCRASQSVSRYLAWYQQKPGQAPRLLIYDASNRATGIPARFSGSGSGTDFTLTISSLEPEDFAVYYCQQDYNYPFTFGGGTKVEIK

SEQ ID NO: 288 - DNA, 321 bp, Artificial sequence
  BIIB-9-471 VL Nucleic Acid Sequence
gaaattgtgttgacacagtctccagccaccctgtctttgtctccaggggaaagagccaccctctcctgcagggccagtcagagtgttagcaggtacttagcctggtaccaacagaaacctggccaggctcccaggctcctcatctatgatgcatccaacagggccactggcatcccagccaggttcagtggcagtgggtctgggacagacttcactctcaccatcagcagcctagagcctgaagattttgcagtttattactgtcagcaggactacaattaccctttcacttttggcggagggaccaaggttgagatcaaa

SEQ ID NO: 289 - protein, 106 aa, Artificial sequence
  BIIB-9-472 VL Amino Acid Sequence
EIVLTQSPATLSLSPGERATLSCRASQSVSSYLAWYQQKPGQAPRLLIYDASNRATGIPARFSGSGSGTDFTLTISSLEPEDFAVYYCQQRSDWPTFGGGTKVEIK

SEQ ID NO: 290 - DNA, 318 bp, Artificial sequence
  BIIB-9-472 VL Nucleic Acid Sequence
gaaattgtgttgacacagtctccagccaccctgtctttgtctccaggggaaagagccaccctctcctgcagggccagtcagagtgttagcagctacttagcctggtaccaacagaaacctggccaggctcccaggctcctcatctatgatgcatccaacagggccactggcatcccagccaggttcagtggcagtgggtctgggacagacttcactctcaccatcagcagcctagagcctgaagattttgcagtttattactgtcagcagagatccgactggcctacttttggcggagggaccaaggttgagatcaaa

SEQ ID NO: 291 - protein, 107 aa, Artificial sequence
  BIIB-9-439 VL Amino Acid Sequence
EIVMTQSPATLSLSPGERATLSCRASQSVSSYLAWYQQKPGQAPRLLIYDSSNRATGIPARFSGSGSGTDFTLTISSLEPEDFAVYYCQQRDNWPFTFGGGTKVEIK

SEQ ID NO: 292 - DNA, 321 bp, Artificial sequence
  BIIB-9-439 VL Nucleic Acid Sequence
gaaattgtgatgacacagtctccagccaccctgtctttgtctccaggggaaagagccaccctctcctgcagggccagtcagagtgttagcagctacttagcctggtaccaacagaaacctggccaggctcccaggctcctcatctatgattcatccaacagggccactggcatcccagccaggttcagtggcagtgggtctgggacagacttcactctcaccatcagcagcctagagcctgaagattttgcagtttattactgtcagcagagagacaactggcctttcacttttggcggagggaccaaggttgagatcaaa

SEQ ID NO: 293 - protein, 108 aa, Artificial sequence
  BIIB-9-446 VL Amino Acid Sequence
EIVLTQSPGTLSLSPGERATLSCRASQSVSSSYLAWYQQKPGQAPRLLIYGASRRATGIPDRFSGSGSGTDFTLTISRLEPEDFAVYYCQQYGNSPLTFGGGTKVEIK

SEQ ID NO: 294 - DNA, 324 bp, Artificial sequence
  BIIB-9-446 VL Nucleic Acid Sequence
gaaattgtgttgacgcagtctccaggcaccctgtctttgtctccaggggaaagagccaccctctcctgcagggccagtcagagtgttagcagcagctacttagcctggtaccagcagaaacctggccaggctcccaggctcctcatctatggtgcatccagaagggccactggcatcccagacaggttcagtggcagtgggtctgggacagacttcactctcaccatcagcagactggagcctgaagattttgcagtgtattactgtcagcagtacggaaacagtcctctcacttttggcggagggaccaaggttgagatcaaa

SEQ ID NO: 295 - protein, 106 aa, Artificial sequence
  BIIB-9-568 VL Amino Acid Sequence
DIQMTQSPSSLSASVGDRVTITCQASQDISNYLNWYQQKPGKAPKLLIYDASNLETGVPSRFSGSGSGTDFTFTISSLQPEDIATYYCQQYDDYLTFGGGTKVEIK

SEQ ID NO: 296 - DNA, 318 bp, Artificial sequence
  BIIB-9-568 VL Nucleic Acid Sequence
gacatccagatgacccagtctccatcctccctgtctgcatctgtaggagacagagtcaccatcacttgccaggcgagtcaggacattagcaactatttaaattggtatcagcagaaaccagggaaagcccctaagctcctgatctacgatgcatccaatttggaaacaggggtcccatcaaggttcagtggaagtggatctgggacagattttactttcaccatcagcagcctgcagcctgaagatattgcaacatattactgtcagcagtacgatgactacctcacttttggcggagggaccaaggttgagatcaaa

SEQ ID NO: 297 - protein, 107 aa, Artificial sequence
  BIIB-9-615 VL Amino Acid Sequence
EIVLTQSPATLSLSPGERATLSCRASQSVSSYLAWYQQKPGQAPRLLIYDASNRATGIPARFSGSGSGTDFTLTISSLEPEDFAVYYCQQSCHWPWTFGGGTKVEIK

SEQ ID NO: 298 - DNA, 321 bp, Artificial sequence
  BIIB-9-615 VL Nucleic Acid Sequence
gaaattgtgttgacacagtctccagccaccctgtctttgtctccaggggaaagagccaccctctcctgcagggccagtcagagtgttagcagctacttagcctggtaccaacagaaacctggccaggctcccaggctcctcatctatgatgcatccaacagggccactggcatcccagccaggttcagtggcagtgggtctgggacagacttcactctcaccatcagcagcctagagcctgaagattttgcagtttattactgtcagcagtcctgtcactggccttggacttttggcggagggaccaaggttgagatcaaa

SEQ ID NO: 299 - protein, 108 aa, Artificial sequence
  BIIB-9-628 VL Amino Acid Sequence
EIVLTQSPGTLSLSPGERATLSCRASQSVSSDYLAWYQQKPGQAPRLLIYGASSRATGIPDRFSGSGSGTDFTLTISRLEPEDFAVYYCQQYVVFPFTFGGGTKVEIK

SEQ ID NO: 300 - DNA, 324 bp, Artificial sequence
  BIIB-9-628 VL Nucleic Acid Sequence
gaaattgtgttgacgcagtctccaggcaccctgtctttgtctccaggggaaagagccaccctctcctgcagggccagtcagagtgttagcagcgactacttagcctggtaccagcagaaacctggccaggctcccaggctcctcatctatggtgcatccagcagggccactggcatcccagacaggttcagtggcagtgggtctgggacagacttcactctcaccatcagcagactggagcctgaagattttgcagtgtattactgtcagcagtacgtcgtcttccctttcacttttggcggagggaccaaggttgagatcaaa

SEQ ID NO: 301 - protein, 107 aa, Artificial sequence
  BIIB-9-882 VL Amino Acid Sequence
EIVMTQSPATLSVSPGERATLSCRASQSVSSNLAWYQQKPGQAPRLLIFGASTRATGIPARFSGSGSGTEFTLTISSLQSEDFAVYYCQQHDNFPPTFGGGTKVEIK

SEQ ID NO: 302 - DNA, 321 bp, Artificial sequence
  BIIB-9-882 VL Nucleic Acid Sequence
gaaatagtgatgacgcagtctccagccaccctgtctgtgtctccaggggaaagagccaccctctcctgcagggccagtcagagtgttagcagcaacttagcctggtaccagcagaaacctggccaggctcccaggctcctcatctttggtgcatccaccagggccactggtatcccagccaggttcagtggcagtgggtctgggacagagttcactctcaccatcagcagcctgcagtctgaagattttgcagtttattactgtcagcagcacgacaatttccctcctacttttggcggagggaccaaggttgagatcaaa

SEQ ID NO: 303 - protein, 108 aa, Artificial sequence
  BIIB-9-884 VL Amino Acid Sequence
EIVLTQSPGTLSLSPGERATLSCRASQSVSSSYLAWYQQKPGQAPRLLIYGASSRATGIPDRFSGSGSGTDFTLTISRLEPEDFAVYYCQQYHLLPPTFGGGTKVEIK

SEQ ID NO: 304 - DNA, 324 bp, Artificial sequence
  BIIB-9-884 VL Amino Acid Sequence
gaaattgtgttgacgcagtctccaggcaccctgtctttgtctccaggggaaagagccaccctctcctgcagggccagtcagagtgttagcagcagctacttagcctggtaccagcagaaacctggccaggctcccaggctcctcatctatggtgcatccagcagggccactggcatcccagacaggttcagtggcagtgggtctgggacagacttcactctcaccatcagcagactggagcctgaagattttgcagtgtattactgtcagcagtaccacctcctccctcctacttttggcggagggaccaaggttgagatcaaa

SEQ ID NO: 305 - protein, 107 aa, Artificial sequence
  BIIB-9-886 VL Amino Acid Sequence
DIQMTQSPSSVSASVGDRVTITCRASQGISSWLAWYQQKPGKAPKLLIYAASSLQSGVPSRFSGSGSGTDFTLTISSLQPEDFATYYCQQASSFPFTFGGGTKVEIK

SEQ ID NO: 306 - DNA, 321 bp, Artificial sequence
  BIIB-9-886 VL Nucleic Acid Sequence
gacatccagatgacccagtctccatcttccgtgtctgcatctgtaggagacagagtcaccatcacttgtcgggcgagtcagggtattagcagctggttagcctggtatcagcagaaaccagggaaagcccctaagctcctgatctatgctgcatccagtttgcaaagtggggtcccatcaaggttcagcggcagtggatctgggacagatttcactctcaccatcagcagcctgcagcctgaagattttgcaacttattactgtcagcaggcatccagtttccctttcacttttggcggagggaccaaggttgagatcaaa

SEQ ID NO: 307 - protein, 107 aa, Artificial sequence; identical to SEQ ID NO: 305
  BIIB-9-887 VL Amino Acid Sequence

SEQ ID NO: 308 - DNA, 321 bp, Artificial sequence; identical to SEQ ID NO: 306
  BIIB-9-887 VL Nucleic Acid Sequence

SEQ ID NO: 309 - protein, 107 aa, Artificial sequence
  BIIB-9-888 VL Amino Acid Sequence
EIVMTQSPATLSVSPGERATLSCRASQSVSSNLAWYQQKPGQAPRLLIYGASTRATGIPARFSGSGSGTEFTLTISSLQPEDFAVYYCQQAFNWPPTFGGGTKVEIK

SEQ ID NO: 310 - DNA, 321 bp, Artificial sequence
  BIIB-9-888 VL Nucleic Acid Sequence
gaaatagtgatgacgcagtctccagccaccctgtctgtgtctccaggggaaagggccaccctctcctgcagggccagtcagagtgttagcagcaacttagcctggtaccagcagaaacctggccaggctcccaggctcctcatctatggtgcatccaccagggccactggtatcccagccaggttcagtggcagtgggtctgggacagagttcactctcaccatcagcagcctgcagcctgaagattttgcagtttattactgtcagcaggccttcaactggcctcctacttttggcggagggaccaaggttgagatcaaa

SEQ ID NO: 311 - protein, 107 aa, Artificial sequence
  BIIB-9-889 VL Amino Acid Sequence
EIVMTQSPATLSVSPGERATLSCRASQSVSSNLAWYQQKPGQAPRLLIYGASTRATGIPARFSGSGSGTEFTLTISSLQSEDFAVYYCQQAFNWPPTFGGGTKVEIK

SEQ ID NO: 312 - DNA, 321 bp, Artificial sequence
  BIIB-9-889 VL Nucleic Acid Sequence
gaaatagtgatgacgcagtctccagccaccctgtctgtgtctccaggggaaagagccaccctctcctgcagggccagtcagagtgttagcagcaacttagcctggtaccagcagaaacctggccaggctcccaggctcctcatctatggtgcatccaccagggccactggtatcccagccaggttcagtggcagtgggtctgggacagagttcactctcaccattagcagcctgcagtctgaagattttgcagtttattactgtcagcaggccttcaactggcctcctacttttggcggagggaccaaggttgagatcaaa

SEQ ID NO: 313 - protein, 107 aa, Artificial sequence
  BIIB-9-433 VL Amino Acid Sequence
EIVLTQSPATLSLSPGERATLSCRASQSVSSYLAWYQQKPGQAPRLLIYDASNRATGIPARFSGSGSGTDFTLTISSLEPEDFAVYYCQQSSAYPPTFGGGTKVEIK

SEQ ID NO: 314 - DNA, 321 bp, Artificial sequence
  BIIB-9-433 VL Nucleic Acid Sequence
gaaattgtgttgacacagtctccagccaccctgtctttgtctccaggggaaagagccaccctctcctgcagggccagtcagagtgttagcagctacttagcctggtaccaacagaaacctggccaggctcccaggctcctcatctatgatgcatccaacagggccactggcatcccagccaggttcagtggcagtgggtctgggacagacttcactctcaccatcagcagcctagagcctgaagattttgcagtttattactgtcagcagtccagtgcctaccctcctacttttggcggagggaccaaggttgagatcaaa

SEQ ID NO: 315 - protein, 107 aa, Artificial sequence
  BIIB-9-445 VL Amino Acid Sequence
EIVMTQSPATLSVSPGERATLSCRASQSVSSNLAWYQQKPGQAPRLLIYSASTRATGIPARFSGSGSGTEFTLTISSLQSEDFAVYYCQQYDNFPFTFGGGTKVEIK

SEQ ID NO: 316 - DNA, 321 bp, Artificial sequence
  BIIB-9-445 VL Nucleic Acid Sequence
gaaatagtgatgacgcagtctccagccaccctgtctgtgtctccaggggaaagagccaccctctcctgcagggccagtcagagtgttagcagcaacttagcctggtaccagcagaaacctggccaggctcccaggctcctcatctatagcgcatccaccagggccactggtatcccagccaggttcagtggcagtgggtctgggacagagttcactctcaccatcagcagcctgcagtctgaagattttgcagtttattactgtcagcagtacgacaatttccctttcacttttggcggagggaccaaggttgagatcaaa

SEQ ID NO: 317 - protein, 105 aa, Artificial sequence
  BIIB-9-470 VL Amino Acid Sequence
DIQMTQSPSTLSASVGDRVTITCRASQSISSWLAWYQQKPGKAPKLLIYKASSLESGVPSRFSGSGSGTEFTLTISSLQPDDFATYYCQHPHSWTFGGGTKVEIK

SEQ ID NO: 318 - DNA, 315 bp, Artificial sequence
  BIIB-9-470 VL Nucleic Acid Sequence
gacatccagatgacccagtctccttccaccctgtctgcatctgtaggagacagagtcaccatcacttgccgggccagtcagagtattagtagctggttggcctggtatcagcagaaaccagggaaagcccctaagctcctgatctataaagcctccagtttggaaagtggggtcccatcaaggttcagcggcagtggatctgggacagaattcactctcaccatcagcagcctgcagcctgatgattttgcaacttattactgccagcatccccactcttggacttttggcggagggaccaaggttgagatcaaa

SEQ ID NO: 319 - protein, 107 aa, Artificial sequence
  BIIB-9-625 VL Amino Acid Sequence
DIQMTQSPSSLSASVGDRVTITCRASQSISSYLNWYQQKPGKAPKLLIYAASSLQSGVPSRFSGSGSGTDFTLTISSLQPEDFATYYCQQSDTDPPTFGGGTKVEIK

SEQ ID NO: 320 - DNA, 321 bp, Artificial sequence
  BIIB-9-625 VL Nucleic Acid Sequence
gacatccagatgacccagtctccatcctccctgtctgcatctgtaggagacagagtcaccatcacttgccgggcaagtcagagcattagcagctatttaaattggtatcagcagaaaccagggaaagcccctaagctcctgatctatgctgcatccagtttgcaaagtggggtcccatcaaggttcagtggcagtggatctgggacagatttcactctcaccatcagcagtctgcaacctgaagattttgcaacttactactgtcagcaaagcgacaccgaccctcctacttttggcggagggaccaaggttgagatcaaa

SEQ ID NO: 321 - protein, 107 aa, Artificial sequence
  BIIB-9-1264 VL Amino Acid Sequence
DIQMTQSPSSLSASVGDRVTITCQASQDITNYLNWYQQKPGKAPKLLIYDASNLETGVPSRFSGSGSGTDFTFTISSLQPEDIATYYCQQVDDYPFTFGGGTKVEIK

SEQ ID NO: 322 - DNA, 321 bp, Artificial sequence
  BIIB-9-1264 VL Nucleic Acid Sequence
gacatccagatgacccagtctccatcctccctgtctgcatctgtaggagacagagtcaccatcacttgccaggcgagtcaggacattaccaactatttaaattggtatcagcagaaaccagggaaagcccctaagctcctgatctacgatgcatccaatttggaaacaggggtcccatcaaggttcagtggaagtggatctgggacagattttactttcaccatcagcagcctgcagcctgaagatattgcaacatattactgtcagcaggtcgatgactaccctttcacttttggcggagggaccaaggttgagatcaaa

SEQ ID NO: 323 - protein, 107 aa, Artificial sequence
  BIIB-9-1265 VL Amino Acid Sequence
DIQMTQSPSSVSASVGDRVTITCRASQGISSWLAWYQQKPGKAPKLLIYAASSLQSGVPSRFSGSGSGTDFTLTISSLQPEDFATYYCQQGNSFPITFGGGTKVEIK

SEQ ID NO: 324 - DNA, 321 bp, Artificial sequence
  BIIB-9-1265 VL Nucleic Acid Sequence
gacatccagatgacccagtctccatcttccgtgtctgcatctgtaggagacagagtcaccatcacttgtcgggcgagtcagggtattagcagctggttagcctggtatcagcagaaaccagggaaagcccctaagctcctgatctatgctgcatccagtttgcaaagtggggtcccatcaaggttcagcggcagtggatctgggacagatttcactctcaccatcagcagcctgcagcctgaagattttgcaacttattactgtcagcagggaaatagtttccctatcacttttggcggagggaccaaggttgagatcaaa

SEQ ID NO: 325 - protein, 107 aa, Artificial sequence
  BIIB-9-1266 VL Amino Acid Sequence
EIVMTQSPATLSLSPGERATLSCRASQSVSSYLAWYQQKPGQAPRLLIYDSSNRATGIPARFSGSGSGTDFTLTISSLEPEDFAVYYCQQRLNFPFTFGGGTKVEIK

SEQ ID NO: 326 - DNA, 321 bp, Artificial sequence
  BIIB-9-1266 VL Nucleic Acid Sequence
gaaattgtgatgacacagtctccagccaccctgtctttgtccccaggggaaagagccaccctctcctgcagggccagtcagagtgttagcagctacttagcctggtaccaacagaaacctggccaggctcccaggctcctcatctatgattcatccaacagggccactggcatcccagccaggttcagtggcagtgggtctgggacagacttcactctcaccatcagcagcctagagcctgaagattttgcagtttattactgtcagcagagactcaatttccctttcacttttggcggagggaccaaggttgagatcaaa

SEQ ID NO: 327 - protein, 113 aa, Artificial sequence
  BIIB-9-1267 VL Amino Acid Sequence
DIVMTQSPDSLAVSLGERATINCKSSQSVLYSSNNKNYLAWYQQKPGQPPKLLIYWASTRESGVPDRFSGSGSGTDFTLTISSLQAEDVAVYYCQQHYVFPFTFGGGTKVEIK

SEQ ID NO: 328 - DNA, 339 bp, Artificial sequence
  BIIB-9-1267 VL Nucleic Acid Sequence
gacatcgtgatgacccagtctccagactccctggctgtgtctctgggcgagagggccaccatcaactgcaagtccagccagagtgttttatacagctccaacaataagaactacttagcttggtaccagcagaaaccaggacagcctcctaagctgctcatttactgggcatctacccgggaatccggggtccctgaccgattcagtggcagcgggtctgggacagatttcactctcaccatcagcagcctgcaggctgaagatgtggcagtttattactgtcagcagcactacgtcttccctttcacttttggcggagggaccaaggttgagatcaaa

SEQ ID NO: 329 - protein, 107 aa, Artificial sequence
  BIIB-9-1268 VL Amino Acid Sequence
EIVMTQSPATLSLSPGERATLSCRASQSVSSYLAWYQQKPGQAPRLLIYDASNRATGIPARFSGSGSGTDFTLTISSLEPEDFAVYYCQQATVWPFTFGGGTKVEIK

SEQ ID NO: 330 - DNA, 321 bp, Artificial sequence
  BIIB-9-1268 VL Nucleic Acid Sequence
gaaattgtgatgacacagtctccagccaccctgtctttgtctccaggggaaagagccaccctctcctgcagggccagtcagagtgttagcagctacttagcctggtaccaacagaaacctggccaggctcccaggctcctcatctatgatgcatccaacagggccactggcatcccagccaggttcagtggcagtgggtctgggacagacttcactctcaccatcagcagcctagagcctgaagattttgcagtttattactgtcagcaggccaccgtctggcctttcacttttggcggagggaccaaggttgagatcaaa

SEQ ID NO: 331 - protein, 107 aa, Artificial sequence
  BIIB-9-1269 VL Amino Acid Sequence
DIQMTQSPSSVSASVGDRVAITCRASQGISSWLAWYQQKPGKAPKLLIYAASSLQSGVPSRFSGSGSGTDFTLTISSLQPEDFATYYCQQASSFPFTFGGGTKVEIK

SEQ ID NO: 332 - DNA, 321 bp, Artificial sequence
  BIIB-9-1269 VL Nucleic Acid Sequence
gacatccagatgacccagtctccatcttccgtgtctgcatctgtaggagacagagtcgccatcacttgtcgggcgagtcagggtattagcagctggttagcctggtatcagcagaaaccagggaaagcccctaagctcctgatctatgctgcatccagtttgcaaagtggggtcccatcaaggttcagcggcagtggatctgggacagatttcactctcaccatcagcagcctgcagcctgaagattttgcaacttattactgtcagcaggcatccagtttccctttcacttttggcggagggaccaaggttgagatcaaa

SEQ ID NO: 333 - protein, 107 aa, Artificial sequence
  BIIB-9-1270 VL Amino Acid Sequence
EIVLTQSPATLSLSPGERATLSCRASQSVSSYLAWYQQKPGQAPRLLIYDASNRATGIPARFSGSGSGTDFTLTISSLEPEDFAVYYCQQSADFPFTFGGGTKVEIK

SEQ ID NO: 334 - DNA, 321 bp, Artificial sequence
  BIIB-9-1270 VL Nucleic Acid Sequence
gaaattgtgttgacacagtctccagccaccctgtctttgtctccaggggaaagagccaccctctcctgcagggccagtcagagtgttagcagctacttagcctggtaccaacagaaacctggccaggctcccaggctcctcatctatgatgcatccaacagggccactggcatcccagccaggttcagtggcagtgggtctgggacagacttcactctcaccatcagcagcctagagcctgaagattttgcagtttattactgtcagcagtccgccgatttccctttcacttttggcggagggaccaaggttgagatcaaa

SEQ ID NO: 335 - protein, 107 aa, Artificial sequence
  BIIB-9-1271 VL Amino Acid Sequence
EIVMTQSPATLSVSPGERATLSCRASQSVSSNLAWYQQKPGQAPRLLIYGASTRATGIPARFSGSGSGTDFTLTISSLQPEDFATYYCQQGFSFPFTFGGGTKVEIK

SEQ ID NO: 336 - DNA, 321 bp, Artificial sequence
  BIIB-9-1271 VL Nucleic Acid Sequence
gaaatagtgatgacgcagtctccagccaccctgtctgtgtctccaggggaaagagccaccctctcctgcagggccagtcagagtgttagcagcaacttagcctggtaccagcagaaacctggccaggctcccaggctcctcatctatggtgcatccaccagggccactggtatcccagccaggttcagtggcagtgggtctgggacagatttcactctcaccatcagcagcctgcagcctgaagattttgcaacttattactgtcagcagggattcagtttccctttcacttttggcggagggaccaaggttgagatcaaa

SEQ ID NO: 337 - protein, 107 aa, Artificial sequence; identical to SEQ ID NO: 305
  BIIB-9-1272 VL Amino Acid Sequence

SEQ ID NO: 338 - DNA, 321 bp, Artificial sequence; identical to SEQ ID NO: 306
  BIIB-9-1272 VL Nucleic Acid Sequence

SEQ ID NO: 339 - protein, 107 aa, Artificial sequence
  BIIB-9-1273 VL Amino Acid Sequence
EIVLTQYPATLSLSPGERATLSCRASQSVSSYLAWYQQKPGQAPRLLIYDASNRATGIPARFSGSGSGTDFTLTISSLEPEDFAVYYCQQSANFPFTFGGGTKVEIK

SEQ ID NO: 340 - DNA, 321 bp, Artificial sequence
  BIIB-9-1273 VL Nucleic Acid Sequence
gaaattgtgttgacacagtatccagccaccctgtctttgtctccaggggaaagagccaccctctcctgcagggccagtcagagtgttagcagctacttagcctggtaccaacagaaacctggccaggctcccaggctcctcatctatgatgcatccaacagggccactggcatcccagccaggttcagtggcagtgggtctgggacagacttcactctcaccatcagcagcctagagcctgaagattttgcagtttattactgtcagcagtccgccaatttccctttcacttttggcggagggaccaaggttgagatcaaa

SEQ ID NO: 341 - protein, 107 aa, Artificial sequence
  BIIB-9-1274 VL Amino Acid Sequence
DIQMTQSPSSVSASVGDRVTITCRASQGISSWLAWYQQKPGKAPKLLIYAASSLQSGVPSRFSGSGSGTDFTLTISSLQPEDFATYYCQQANSFPFTFGGGTKVEIK

SEQ ID NO: 342 - DNA, 321 bp, Artificial sequence
  BIIB-9-1274 VL Nucleic Acid Sequence
gacatccagatgacccagtctccatcttccgtgtctgcatctgtaggagacagagtcaccatcacttgtcgggcgagtcagggtattagcagctggttagcctggtatcagcagaaaccagggaaagcccctaagctcctgatctatgctgcatccagtttgcaaagtggggtcccatcaaggttcagcggcagtggatctgggacagatttcactctcaccatcagcagcctgcagcctgaagattttgcaacttattactgtcagcaggcaaattccttccctttcacttttggcggagggaccaaggttgagatcaaa

SEQ ID NO: 343 - protein, 107 aa, Artificial sequence
  BIIB-9-1275 VL Amino Acid Sequence
DIQMTQSPSSVSASVGDRVTITCRASQGISGWLAWYQQKPGKAPKLLIYAASSLQSGVPSRFSGSGSGTDFTLTISSLQPEDFATYYCQQANSLPITFGGGTKVEIK

SEQ ID NO: 344 - DNA, 321 bp, Artificial sequence
  BIIB-9-1275 VL Nucleic Acid Sequence
gacatccagatgacccagtctccatcttccgtgtctgcatctgtaggagacagagtcaccatcacttgtcgggcgagtcagggtattagcggctggttagcctggtatcagcagaaaccagggaaagcccctaagctcctgatctatgctgcatccagtttgcaaagtggggtcccatcaaggttcagcggcagtggatctgggacagatttcactctcaccatcagcagcctgcagcctgaagattttgcaacttattactgtcagcaggcaaattccctccctatcacttttggcggagggaccaaggttgagatcaaa

SEQ ID NO: 345 - protein, 107 aa, Artificial sequence; identical to SEQ ID NO: 323
  BIIB-9-1276 VL Amino Acid Sequence

SEQ ID NO: 346 - DNA, 321 bp, Artificial sequence; identical to SEQ ID NO: 324
  BIIB-9-1276 VL Nucleic Acid Sequence

SEQ ID NO: 347 - protein, 107 aa, Artificial sequence
  BIIB-9-1277 VL Amino Acid Sequence
EIVMTQSPATLSVSPGERATLSCRASQSVSSYLAWYQQKPGQAPRLLIYDASNRATGIPARFSGSGSGTDFTLTISSLEPEDLAVYYCQQSANWPPTFGGGTKVEIK

SEQ ID NO: 348 - DNA, 321 bp, Artificial sequence
  BIIB-9-1277 VL Nucleic Acid Sequence
gaaatagtgatgacgcagtctccagccaccctgtctgtgtctccaggggaaagagccaccctctcctgcagggccagtcagagtgttagcagctacttagcctggtaccaacagaaacctggccaggctcccaggctcctcatctatgatgcatccaacagggccactggcatcccagccaggttcagtggcagtgggtctgggacagacttcactctcaccatcagcagcctagagcctgaagatcttgcagtttattactgtcagcagtccgccaattggcctcctacttttggcggagggaccaaggttgagatcaaa

SEQ ID NO: 349 - protein, 107 aa, Artificial sequence
  BIIB-9-1278 VL Amino Acid Sequence
EIVMTQSPATLSVSPGERATLSCRASQSVSSNLAWYQQKPGQAPRLLIYGASTRATGIPARFSGSGSGTEFTLTISSLQSEDFAVYYCQQHANFPPTFGGGTKVEIK

SEQ ID NO: 350 - DNA, 321 bp, Artificial sequence
  BIIB-9-1278 VL Nucleic Acid Sequence
gaaatagtgatgacgcagtctccagccaccctgtctgtgtctccaggggaaagagccaccctctcctgcagggccagtcagagtgttagcagcaacttagcctggtaccagcagaaacctggccaggctcccaggctcctcatctatggtgcatccaccagggccactggtatcccagccaggttcagtggcagtgggtctgggacagagttcactctcaccatcagcagcctgcagtctgaagattttgcagtttattactgtcagcagcacgccaattttcctcctacttttggcggagggaccaaggttgagatcaaa

SEQ ID NO: 351 - protein, 107 aa, Artificial sequence
  BIIB-9-1279 VL Amino Acid Sequence
DIQMTQSPSSVSASVGDRVTITCRASQGISSWLAWYQQKPGKAPKLLIYAASSLQSGVPSRFSGSGSGTDFTLTISSLQPEDFATYYCQQASSFPPTFGGGTKVEIK

SEQ ID NO: 352 - DNA, 321 bp, Artificial sequence
  BIIB-9-1279 VL Nucleic Acid Sequence
gacatccagatgacccagtctccatcttccgtgtctgcatctgtaggagacagagtcaccatcacttgtcgggcgagtcagggtattagcagctggttagcctggtatcagcagaaaccagggaaagcccctaagctcctgatctatgctgcatccagtttgcaaagtggggtcccatcaaggttcagcggcagtggatctgggacagatttcactctcaccatcagcagcctgcagcctgaagattttgcaacttattactgtcagcaggcatccagtttccctcctacttttggcggagggaccaaggttgagatcaaa

SEQ ID NO: 353 - protein, 107 aa, Artificial sequence
  BIIB-9-1280 VL Amino Acid Sequence
DIQMTQSPSSLSASVGDRVTITCRASQSISSYLNWYQQKPGKAPKLLIYAASSLQSGVPSRFSGSGSGTDFTLTISSLQPEDFATYYCQQAYSLPITFGGGTKVEIK

SEQ ID NO: 354 - DNA, 321 bp, Artificial sequence
  BIIB-9-1280 VL Nucleic Acid Sequence
gacatccagatgacccagtctccatcctccctgtctgcatctgtaggagacagagtcaccatcacttgccgggcaagtcagagcattagcagctatttaaattggtatcagcagaaaccagggaaagcccctaagctcctgatctatgctgcatccagtttgcaaagtggggtcccatcaaggttcagtggcagtggatctgggacagatttcactctcaccatcagcagtctgcaacctgaagattttgcaacttactactgtcagcaagcatacagtctccctatcacttttggcggagggaccaaggttgagatcaaa

SEQ ID NO: 355 - protein, 107 aa, Artificial sequence
  BIIB-9-1281 VL Amino Acid Sequence
DIQMTQSPSTLSASVGDRVTITCRASQSISSWLAWYQQKPGKAPKLLIYKASSLESGVPSRFSGSGSGTDFTLTISSLQPEDFATYYCQQAISLPITFGGGTKVEIK

SEQ ID NO: 356 - DNA, 321 bp, Artificial sequence
  BIIB-9-1281 VL Nucleic Acid Sequence
gacatccagatgacccagtctccttccaccctgtctgcatctgtaggagacagagtcaccatcacttgccgggccagtcagagtattagtagctggttggcctggtatcagcagaaaccagggaaagcccctaagctcctgatctataaagcctccagtttggaaagtggggtcccatcaaggttcagcggcagtggatctgggacagatttcactctcaccatcagcagcctgcagcctgaagattttgcaacttattactgtcagcaggcaatcagtctccctatcacttttggcggagggaccaaggttgagatcaaa

SEQ ID NO: 357 - protein, 107 aa, Artificial sequence
  BIIB-9-1282 VL Amino Acid Sequence
EIVMTQSPATLSVSPGERATLSCRASQSVSSNLAWYQQKPGQAPRLLIYGASTRATGIPARFSGSGSGTEFTLTISSLQSEDFAVYYCQQHNHLPITFGGGTKVEIK

SEQ ID NO: 358 - DNA, 321 bp, Artificial sequence
  BIIB-9-1282 VL Nucleic Acid Sequence
gaaatagtgatgacgcagtctccagccaccctgtctgtgtctccaggggaaagagccaccctctcctgcagggccagtcagagtgttagcagcaacttagcctggtaccagcagaaacctggccaggctcccaggctcctcatctatggtgcatccaccagggccactggtatcccagccaggttcagtggcagtgggtctgggacagagttcactctcaccatcagcagcctgcagtctgaagattttgcagtttattactgtcagcagcacaatcacctccctatcacttttggcggagggaccaaggttgagatcaaa

SEQ ID NO: 359 - protein, 107 aa, Artificial sequence; identical to SEQ ID NO: 351
  BIIB-9-1283 VL Amino Acid Sequence

SEQ ID NO: 360 - DNA, 321 bp, Artificial sequence; identical to SEQ ID NO: 352
  BIIB-9-1283 VL Nucleic Acid Sequence

SEQ ID NO: 361 - protein, 107 aa, Artificial sequence
  BIIB-9-1284 VL Amino Acid Sequence
EIVLTQSPATLSVSPGERATLSCRASQSVGSNLAWYQQKPGQAPRLLIYGASTRATGIPARFSGSGSGTEFTLTISSLQSEDFAVYYCQQHNHLPITFGGGTKVEIK

SEQ ID NO: 362 - DNA, 321 bp, Artificial sequence
  BIIB-9-1284 VL Nucleic Acid Sequence
gaaatagtgttgacgcagtctccagccaccctgtctgtgtctccaggggaaagagccaccctctcctgcagggccagtcagagtgttggcagcaacttagcctggtaccagcagaaacctggccaggctcccaggctcctcatctatggtgcatccaccagggccactggtatcccagccaggttcagtggcagtgggtctgggacagagttcactctcactatcagcagcctgcagtctgaagattttgcagtttattactgtcagcagcacaatcacctccctatcacttttggcggagggaccaaggttgagatcaaa

SEQ ID NO: 363 - protein, 107 aa, Artificial sequence
  BIIB-9-1285 VL Amino Acid Sequence
EIVMTQSPATLSVSPGERATLSCRASQSVSSNLAWYQQKPGQAPRLLIYGASTRATGIPARFSGSGSGTEFTLTISSLQSEDFAVYYCQQASNFPPTFGGGTKVEIK

SEQ ID NO: 364 - DNA, 321 bp, Artificial sequence
  BIIB-9-1285 VL Nucleic Acid Sequence
gaaatagtgatgacgcagtctccagccaccctgtctgtgtctccaggggaaagagccaccctctcctgcagggccagtcagagtgttagcagcaacttagcctggtaccagcagaaacctggccaggctcccaggctcctcatctatggtgcatccaccagggccactggtatcccagccaggttcagtggcagtgggtctgggacagagttcactctcaccatcagcagcctgcagtctgaagattttgcagtttattactgtcagcaggcctccaatttccctcctacttttggcggagggaccaaggttgagatcaaa

SEQ ID NO: 365 - protein, 107 aa, Artificial sequence
  BIIB-9-1286 VL Amino Acid Sequence
DIQMTQSPSSVSASVGDRVTITCRASQGISSWLAWYQQKPGKAPKLLIYAASSLQSGVPSRFSGSGSGTDFTLTISSLQPEDFVTYYCQQASSFPPTFGGGTKVEIK

SEQ ID NO: 366 - DNA, 321 bp, Artificial sequence
  BIIB-9-1286 VL Nucleic Acid Sequence
gacatccagatgacccagtctccatcttccgtgtctgcatctgtaggagacagagtcaccatcacttgtcgggcgagtcagggtattagcagctggttagcctggtatcagcagaaaccagggaaagcccctaagctcctgatctatgctgcatccagtttgcaaagtggggtcccatcaaggttcagcggcagtggatctgggacagatttcactctcaccatcagcagcctgcagcctgaagattttgtaacttattactgtcagcaggcatccagtttccctcctacttttggcggagggaccaaggttgagatcaaa

SEQ ID NO: 367 - protein, 107 aa, Artificial sequence
  BIIB-9-1287 VL Amino Acid Sequence
EIVLTQSPGTLSLSPGERATLSCRASQSVSSSYLAWYQQKPGQAPRLLIYGASSRATGIPDRFSGSGSGTDFTLTISRLEPEDFAVYYCQQYHLHPTFGGGTKVEIK

SEQ ID NO: 368 - DNA, 321 bp, Artificial sequence
  BIIB-9-1287 VL Nucleic Acid Sequence
gaaattgtgttgacgcagtctccaggcaccctgtctttgtctccaggggaaagagccaccctctcctgcagggccagtcagagtgttagcagcagctacttagcctggtaccagcagaaacctggccaggctcccaggctcctcatctatggtgcatccagcagggccactggcatcccagacaggttcagtggcagtgggtctgggacagacttcactctcaccatcagcagactggagcctgaagattttgcagtgtattactgtcagcagtaccacctccaccctacttttggcggagggaccaaggttgagatcaaa

SEQ ID NO: 369 - protein, 107 aa, Artificial sequence
  BIIB-9-397 VL Amino Acid Sequence
DIQMTQSPSSLSASVGDRVTITCQASQDISNYLNWYQQKPGKAPKLLIYDASNLETGVPSRFSGSGSGTDFTFTISSLQPEDIATYYCQQSDDHPPTFGGGTKVEIK

SEQ ID NO: 370 - DNA, 321 bp, Artificial sequence
  BIIB-9-397 VL Nucleic Acid Sequence
gacatccagatgacccagtctccatcctccctgtctgcatctgtaggagacagagtcaccatcacttgccaggcgagtcaggacattagcaactatttaaattggtatcagcagaaaccagggaaagcccctaagctcctgatctacgatgcatccaatttggaaacaggggtcccatcaaggttcagtggaagtggatctgggacagattttactttcaccatcagcagcctgcagcctgaagatattgcaacatattactgtcagcagtccgatgaccaccctcctacttttggcggagggaccaaggttgagatcaaa

SEQ ID NO: 371 - protein, 107 aa, Artificial sequence
  BIIB-9-578 VL Amino Acid Sequence
DIQMTQSPSSVSASVGDRVTITCRASQGIDSWLAWYQQKPGKAPKLLIYAASSLQSGVPSRFSGSGSGTDFTLTISSLQPEDFATYYCQQANFLPFTFGGGTKVEIK

SEQ ID NO: 372 - DNA, 321 bp, Artificial sequence
  BIIB-9-578 VL Nucleic Acid Sequence
gacatccagatgacccagtctccatcttccgtgtctgcatctgtaggagacagagtcaccatcacttgtcgggcgagtcagggtattgacagctggttagcctggtatcagcagaaaccagggaaagcccctaagctcctgatctatgctgcatccagtttgcaaagtggggtcccatcaaggttcagcggcagtggatctgggacagatttcactctcaccatcagcagcctgcagcctgaagattttgcaacttattactgtcagcaggcaaatttcctccctttcacttttggcggagggaccaaggttgagatcaaa

SEQ ID NO: 373 - protein, 107 aa, Artificial sequence
  BIIB-9-631 VL Amino Acid Sequence
DIQMTQSPSSVSASVGDRVTITCRASQGISRWLAWYQQKPGKAPKLLIYAASSLQSGVPSRFSGSGSGTDFTLTISSLQPEDFATYYCQQRTSFPLTFGGGTKVEIK

SEQ ID NO: 374 - DNA, 321 bp, Artificial sequence
  BIIB-9-631 VL Nucleic Acid Sequence
gacatccagatgacccagtctccatcttccgtgtctgcatctgtaggagacagagtcaccatcacttgtcgggcgagtcagggtattagcaggtggttagcctggtatcagcagaaaccagggaaagcccctaagctcctgatctatgctgcatccagtttgcaaagtggggtcccatcaaggttcagcggcagtggatctgggacagatttcactctcaccatcagcagcctgcagcctgaagattttgcaacttattactgtcagcagagaaccagtttccctctcacttttggcggagggaccaaggttgagatcaaa

SEQ ID NO: 375 - protein, 107 aa, Artificial sequence
  BIIB-9-612 VL Amino Acid Sequence
EIVLTQSPATLSLSPGERATLSCRASQSVSRYLAWYQQKPGQAPRLLIYDASNRATGIPARFSGSGSGTDFTLTISSLEPEDFAVYYCQQSSLFPLTFGGGTKVEIK

SEQ ID NO: 376 - DNA, 321 bp, Artificial sequence
  BIIB-9-612 VL Nucleic Acid Sequence
gaaattgtgttgacacagtctccagccaccctgtctttgtctccaggggaaagagccaccctctcctgcagggccagtcagagtgttagcaggtacttagcctggtaccaacagaaacctggccaggctcccaggctcctcatctatgatgcatccaacagggccactggcatcccagccaggttcagtggcagtgggtctgggacagacttcactctcaccatcagcagcctagagcctgaagattttgcagtttattactgtcagcagtccagtctcttccctctcacttttggcggagggaccaaggttgagatcaaa

SEQ ID NO: 377 - protein, 121 aa, Artificial sequence
  BIIB-12-891 VH Amino Acid Sequence
QVQLVQSGAEVKKPGASVKVSCKASGYTFTSYYIHWVRQAPGQGLEWMGIINPSGGSTSYAQKFQGRVTMTRDTSTSTVYMELSSLRSEDTAVYYCARASIYRGLGAFDIWGQGTMVTVSS

SEQ ID NO: 378 - DNA, 363 bp, Artificial sequence
  BIIB-12-891 VH Nucleic Acid Sequence
caggtgcagctggtgcagtctggggctgaggtgaagaagcctggggcctcagtgaaggtttcctgcaaggcatctggatacaccttcaccagctactatatccactgggtgcgacaggcccctggacaagggcttgagtggatgggaataatcaaccctagtggtggtagcacaagctacgcacagaagttccagggcagagtcaccatgaccagggacacgtccacgagcacagtctacatggagctgagcagcctgagatctgaggacacggcggtgtactactgcgctagggcatctatataccgaggtctcggagccttcgacatatggggtcagggtacaatggtcaccgtctcctca

SEQ ID NO: 379 - protein, 121 aa, Artificial sequence
  BIIB-12-892 VH Amino Acid Sequence
QVQLVQSGAEVKKPGASVKVSCKASGYTFTSYYMHWVRQAPGQGLEWMGIINPSGGSTSYAQKFQGRVTMTRDTSTSTVYMELSSLRSEDTAVYYCARGLGRRTPTAFDIWGQGTMVTVSS

SEQ ID NO: 380 - DNA, 363 bp, Artificial sequence
  BIIB-12-892 VH Nucleic Acid Sequence
caggtgcagctggtgcagtctggggctgaggtgaagaagcctggggcctcagtgaaggtttcctgcaaggcatctggatacaccttcaccagctactatatgcactgggtgcgacaggcccctggacaagggcttgagtggatgggaataatcaaccctagtggtggtagcacaagctacgcacagaagttccagggcagagtcaccatgaccagggacacgtccacgagcacagtctacatggagctgagcagcctgagatctgaggacacggcggtgtactactgcgccagaggactaggaagaagaactccaaccgcctttgatatttggggtcagggtacaatggtcaccgtctcctca

SEQ ID NO: 381 - protein, 123 aa, Artificial sequence
  BIIB-12-893 VH Amino Acid Sequence
QVQLVQSGAEVKKPGASVKVSCKASGYTFTSYYMVWVRQAPGQGLEWMGIINPSGGSTSYAQKFQGRVTMTRDTSTSTVYMELSSLRSEDTAVYYCARDPGRRQYSFYGMDVWGQGTTVTVSS

SEQ ID NO: 382 - DNA, 369 bp, Artificial sequence
  BIIB-12-893 VH Nucleic Acid Sequence
caggtgcagctggtgcagtctggggctgaggtgaagaagcctggggcctcagtgaaggtttcctgcaaggcatctggatacaccttcaccagctactatatggtctgggtgcgacaggcccctggacaagggcttgagtggatgggaataatcaaccctagtggtggtagcacaagctacgcacagaagttccagggcagagtcaccatgaccagggacacgtccacgagcacagtctacatggagctgagcagcctgagatctgaggacacggcggtgtactactgcgccagagatccaggaagaaggcaatactctttctacggtatggatgtctggggccagggaacaactgtcaccgtctcctca

SEQ ID NO: 383 - protein, 120 aa, Artificial sequence
  BIIB-12-895 VH Amino Acid Sequence
QVQLVQSGAEVKKPGASVKVSCKASGYTFTSYYMHWVRQAPGQGLEWMGIINPSGGSTSYAQKFQGRVTMTRDTSTSTVYMELSSLRSEDTAVYYCARGGGYKSRGIDYWGQGTLVTVSS

SEQ ID NO: 384 - DNA, 360 bp, Artificial sequence
  BIIB-12-895 VH Nucleic Acid Sequence
caggtgcagctggtgcagtctggggctgaggtgaagaagcctggggcctcagtgaaggtttcctgcaaggcatctggatacaccttcaccagctactatatgcactgggtgcgacaggcccctggacaagggcttgagtggatgggaataatcaaccctagtggtggtagcacaagctacgcacagaagttccagggcagagtcaccatgaccagggacacgtccacgagcacagtctacatggagctgagcagcctgagatctgaggacacggcggtgtactactgcgccagaggtggaggatacaaatctagaggcattgactactggggacagggtacattggtcaccgtctcctca

SEQ ID NO: 385 - protein, 120 aa, Artificial sequence
  BIIB-12-896 VH Amino Acid Sequence
QVQLVQSGAEVKKPGASVKVSCKASGYTFTSYYMHWVRQAPGQGLEWMGIINPSGGSTSYAQKFQGRVTMTRDTSTSTVYMELSSLRSEDTAVYYCARGLGQQRRGFDIWGQGTLVTVSS

SEQ ID NO: 386 - DNA, 360 bp, Artificial sequence
  BIIB-12-896 VH Nucleic Acid Sequence
caggtgcagctggtgcagtctggggctgaggtgaagaagcctggggcctcagtgaaggtttcctgcaaggcatctggatacaccttcaccagctactatatgcactgggtgcgacaggcccctggacaagggcttgagtggatgggaataatcaaccctagtggtggtagcacaagctacgcacagaagttccagggcagagtcaccatgaccagggacacgtccacgagcacagtctacatggagctgagcagcctgagatctgaggacacggcggtgtactactgcgccagaggactaggacagcagcggcgtggcttcgacatatggggtcagggtacattggtcaccgtctcctca

SEQ ID NO: 387 - protein, 122 aa, Artificial sequence
  BIIB-12-897 VH Amino Acid Sequence
QLQLQESGPGLVKPSETLSLTCTVSGGSISSSSYYWGWIRQPPGKGLEWIGSIYYSGSTYYNPSLKSRVTISVDTSKNQFSLKLSSVTAADTAVYYCAREGRTYYGGWFDPWGQGTLVTVSS

SEQ ID NO: 388 - DNA, 366 bp, Artificial sequence
  BIIB-12-897 VH Nucleic Acid Sequence
cagctgcagctgcaggagtcgggcccaggactggtgaagccttcggagaccctgtccctcacctgcactgtctctggtggctccatcagcagtagtagttactactggggctggatccgccagcccccagggaaggggctggagtggattgggagtatctattatagtgggagcacctactacaacccgtccctcaagagtcgagtcaccatatccgtagacacgtccaagaaccagttctccctgaagctgagttctgtgaccgccgcagacacggcggtgtactactgcgccagagaagggagaacatactacggcggttggttcgatccctggggacagggtacattggtcaccgtctcctca

SEQ ID NO: 389 - protein, 119 aa, Artificial sequence
  BIIB-12-898 VH Amino Acid Sequence
QVQLVQSGAEVKKPGASVKVSCKASGYTFTSYYMHWVRQAPGQGLEWMGIINPSGGSTTYAQKFQGRVTMTRDTSTSTVYMELSSLRSEDTAVYYCARGDRMLRAFDPWGQGTLVTVSS

SEQ ID NO: 390 - DNA, 357 bp, Artificial sequence
  BIIB-12-898 VH Nucleic Acid Sequence
caggtgcagctggtgcagtctggggctgaggtgaagaagcctggggcctcagtgaaggtttcctgcaaggcatctggatacaccttcaccagctactatatgcactgggtgcgacaggcccctggacaagggcttgagtggatgggaataatcaaccctagtggtggtagcacaacctacgcacagaagttccagggcagagtcaccatgaccagggacacgtccacgagcacagtctacatggagctgagcagcctgagatctgaggacacggcggtgtactactgcgccagaggggacaggatgttaagagcattcgacccatggggacagggtacattggtcaccgtctcctca

SEQ ID NO: 391 - protein, 121 aa, Artificial sequence
  BIIB-12-899 VH Amino Acid Sequence
QVQLVQSGAEVKKPGASVKVSCKASGYTFTSYYMHWVRQAPGQGLEWMGIINPSGGSTSYAQKFQGRVTMTRDTSTSTVYMELSSLRSEDTAVYYCARGPRTSSPLYFDLWGRGTLVTVSS

SEQ ID NO: 392 - DNA, 363 bp, Artificial sequence
  BIIB-12-899 VH Nucleic Acid Sequence
caggtgcagctggtgcagtctggggctgaggtgaagaagcctggggcctcagtgaaggtttcctgcaaggcatctggatacaccttcaccagctactatatgcactgggtgcgacaggcccctggacaagggcttgagtggatgggaataatcaaccctagtggtggtagcacaagctacgcacagaagttccagggcagagtcaccatgaccagggacacgtccacgagcacagtctacatggagctgagcagcctgagatctgaggacacggcggtgtactactgcgccagagggcctagaacatcatcacctctatacttcgacctatgggggagaggtaccttggtcaccgtctcctca

SEQ ID NO: 393 - protein, 122 aa, Artificial sequence
  BIIB-12-900 VH Amino Acid Sequence
QVQLVQSGAEVKKPGASVKVSCKASGYTFTSYYMHWVRQAPGQGLEWMGIINPGGGSTSYAQKFQGRVTMTRDTSTSTVYMELSSLRSEDTAVYYCARSGGMYDRELGMDVWGQGTTVTVSS

SEQ ID NO: 394 - DNA, 366 bp, Artificial sequence
  BIIB-12-900 VH Nucleic Acid Sequence
caggtgcagctggtgcagtctggggctgaggtgaagaagcctggggcctcagtgaaggtttcctgcaaggcatctggatacaccttcaccagctactatatgcactgggtgcgacaggcccctggacaagggcttgagtggatgggaataatcaaccctggtggtggtagcacaagctacgcacagaagttccagggcagagtcaccatgaccagggacacgtccacgagcacagtctacatggagctgagcagcctgagatctgaggacacggcggtgtactactgcgccagatcaggcggaatgtacgaccgagagctcggaatggacgtatggggccagggaacaactgtcaccgtctcctca

SEQ ID NO: 395 - protein, 122 aa, Artificial sequence
  BIIB-12-901 VH Amino Acid Sequence
QVQLVQSGAEVKKPGASVKVSCKASGYTFTSYYMSWVRQAPGQGLEWMGIINPSGGSTSYAQKFQGRVTMTRDTSTSTVYMELSSLRSEDTAVYYCARSRPRRPSPYGMDVWGQGTTVTVSS

SEQ ID NO: 396 - DNA, 366 bp, Artificial sequence
  BIIB-12-901 VH Nucleic Acid Sequence
caggtgcagctggtgcagtctggggctgaggtgaagaagcctggggcctcagtgaaggtttcctgcaaggcatctggatacaccttcaccagctactatatgtcatgggtgcgacaggcccctggacaagggcttgagtggatgggaataatcaaccctagtggtggtagcacaagctacgcacagaagttccagggcagagtcaccatgaccagggacacgtccacgagcacagtctacatggagctgagcagcctgagatctgaggacacggcggtgtactactgcgctagatcaagaccaagacgaccaagcccatacggaatggacgtatggggccagggaacaactgtcaccgtctcctca

SEQ ID NO: 397 - protein, 122 aa, Artificial sequence
  BIIB-12-902 VH Amino Acid Sequence
QVQLVQSGAEVKKPGASVKVSCKASGYTFTSYYMHWVRQAPGQGLEWMGIINPGGGSTSYAQKFQGRVTMTRDTSTSTVYMELSSLRSEDTAVYYCARGGPRRAYSWYFDYWGQGTLVTVSS

SEQ ID NO: 398 - DNA, 366 bp, Artificial sequence
  BIIB-12-902 VH Nucleic Acid Sequence
caggtgcagctggtgcagtctggggctgaggtgaagaagcctggggcctcagtgaaggtttcctgcaaggcatctggatacaccttcaccagctactatatgcactgggtgcgacaggcccctggacaagggcttgagtggatgggaataatcaaccctggtggtggtagcacaagctacgcacagaagttccagggcagagtcaccatgaccagggacacgtccacgagcacagtctacatggagctgagcagcctgagatctgaggacacggcggtgtactactgcgccagaggtgggcctagaagggcctacagctggtactttgactactggggacagggtacattggtcaccgtctcctca

SEQ ID NO: 399 - protein, 120 aa, Artificial sequence
  BIIB-12-903 VH Amino Acid Sequence
QVQLVQSGAEVKKPGASVKVSCKASGYTFTSYYMHWVRQAPGQGLEWMGIINPSGGSTSYAQKFQGRVTMTRDTSTSTVYMELSSLRSEDTAVYYCARDLGYTAGAFGYWGQGTLVTVSS

SEQ ID NO: 400 - DNA, 360 bp, Artificial sequence
  BIIB-12-903 VH Nucleic Acid Sequence
caggtgcagctggtgcagtctggggctgaggtgaagaagcctggggcctcagtgaaggtttcctgcaaggcatctggatacaccttcaccagctactatatgcactgggtgcgacaggcccctggacaagggcttgagtggatgggaataatcaaccctagtggtggtagcacaagctacgcacagaagttccagggcagagtcaccatgaccagggacacgtccacgagcacagtctacatggagctgagcagcctgagatctgaggacacggcggtgtactactgcgccagagacctgggatacaccgcaggggcttttggctactggggacagggtacattggtcaccgtctcctca

SEQ ID NO: 401 - protein, 118 aa, Artificial sequence
  BIIB-12-904 VH Amino Acid Sequence
QVQLVESGGGVVQPGRSLRLSCAASGFTFSSYGMHWVRQAPGKGLEWVAVISYDGSNKYYADSVKGRFTISRDNSKNTLYLQMNSLRAEDTAVYYCARGSGRSGYHYWGQGTLVTVSS

SEQ ID NO: 402 - DNA, 354 bp, Artificial sequence
  BIIB-12-904 VH Nucleic Acid Sequence
caggtgcagctggtggagtctgggggaggcgtggtccagcctgggaggtccctgagactctcctgtgcagcgtctggattcaccttcagtagctatggcatgcactgggtccgccaggctccaggcaaggggctggagtgggtggcagttatatcgtatgatggaagtaataaatactatgcagactccgtgaagggccgattcaccatctccagagacaattccaagaacacgctgtatctgcaaatgaacagcctgagagccgaggacacggcggtgtactactgcgccagaggctctggaagatccgggtaccattactggggacagggtacattggtcaccgtctcctca

SEQ ID NO: 403 - protein, 116 aa, Artificial sequence
  BIIB-12-905 VH Amino Acid Sequence
QVQLVESGGGVVQPGRSLRLSCAASGFTFSSYGMHWVRQAPGKGLEWVAVISYDGSNKYYADSVKGRFTISRDNSKNTLYLQMNSLRAEDTAVYYCAKGGTYLDTWGQGTLVTVSS

SEQ ID NO: 404 - DNA, 348 bp, Artificial sequence
  BIIB-12-905 VH Nucleic Acid Sequence
caggtgcagctggtggagtctgggggaggcgtggtccagcctgggaggtccctgagactctcctgtgcagcgtctggattcaccttcagtagctatggcatgcactgggtccgccaggctccaggcaaggggctggagtgggtggcagttatatcgtatgatggaagtaataaatactatgcagactccgtgaagggccgattcaccatctccagagacaattccaagaacacgctgtatctgcaaatgaacagcctgagagccgaggacacggcggtgtactactgcgccaagggcggaacatacttagacacttggggacagggtacattggtcaccgtctcctca

SEQ ID NO: 405 - protein, 116 aa, Artificial sequence
  BIIB-12-906 VH Amino Acid Sequence
QVQLVESGGGVVQPGRSLRLSCAASGFTFSSYGMHWVRQAPGKGLEWVAVISYDGSNKYYADSVKGRFTISRDNSKNTLYLQMNSLRAEDTAVYYCAKSSRHFDYWGRGTLVTVSS

SEQ ID NO: 406 - DNA, 348 bp, Artificial sequence
  BIIB-12-906 VH Nucleic Acid Sequence
caggtgcagctggtggagtctgggggaggcgtggtccagcctgggaggtccctgagactctcctgtgcagcgtctggattcaccttcagtagctatggcatgcactgggtccgccaggctccaggcaaggggctggagtgggtggcagttatatcgtatgatggaagtaataaatactatgcagactccgtgaagggccgattcaccatctccagagacaattccaagaacacgctgtatctgcaaatgaacagcctgagagccgaggacacggcggtgtactactgcgccaagtctagtagacatttcgattactggggacggggtacattggtcaccgtctcctca

SEQ ID NO: 407 - protein, 118 aa, Artificial sequence
  BIIB-12-907 VH Amino Acid Sequence
QVQLQESGPGLVKPSETLSLTCAVSGYSISSGYYWAWIRQPPGKGLEWIGSIYHSGSTYYNPSLKSRVTISVDTSKNQFSLKLSSVTAADTAVYYCARESGMSGAAYWGQGTLVTVSS

SEQ ID NO: 408 - DNA, 354 bp, Artificial sequence
  BIIB-12-907 VH Nucleic Acid Sequence
caggtgcagctgcaggagtcgggcccaggactggtgaagccttcggagaccctgtccctcacctgcgctgtctctggttactccatcagcagtggttactactgggcttggatccggcagcccccagggaaggggctggagtggattgggagtatctatcatagtgggagcacctactacaacccgtccctcaagagtcgagtcaccatatcagtagacacgtccaagaaccagttctccctgaagctgagttctgtgaccgccgcagacacggcggtgtactactgcgccagagagtctggaatgagcggagcggcttactggggacagggtacattggtcaccgtctcctca

SEQ ID NO: 409 - protein, 116 aa, Artificial sequence
  BIIB-12-908 VH Amino Acid Sequence
QVQLVESGGGVVQPGRSLRLSCAASGFTFSSYGMHWVRQAPGKGLEWVAVISYDGSNKYYADSVKGRFTISRDNSKNTLYLQMNSLRAEDTAVYYCAKGPRGMDVWGQGTTVTVSS

SEQ ID NO: 410 - DNA, 348 bp, Artificial sequence
  BIIB-12-908 VH Nucleic Acid Sequence
caggtgcagctggtggagtctgggggaggcgtggtccagcctgggaggtccctgagactctcctgtgcagcgtctggattcaccttcagtagctatggcatgcactgggtccgccaggctccaggcaaggggctggagtgggtggcagttatatcgtatgatggaagtaataaatactatgcagactccgtgaagggccgattcaccatctccagagacaattccaagaacacgctgtatctgcaaatgaacagcctgagagccgaggacacggcggtgtactactgcgccaagggccccagaggaatggacgtatggggccagggaacaactgtcaccgtctcctca

SEQ ID NO: 411 - protein, 119 aa, Artificial sequence
  BIIB-12-909 VH Amino Acid Sequence
QVQLVESGGGVVQPGRSLRLSCAASGFTFSSYGMHWVRQAPGKGLEWVAVISYDGSNKYYADSVKGRFTISRDNSKNTLYLQMNSLRAEDTAVYYCAKGKHRRRSFDIWGQGTMVTVSS

SEQ ID NO: 412 - DNA, 357 bp, Artificial sequence
  BIIB-12-909 VH Nucleic Acid Sequence
caggtgcagctggtggagtctgggggaggcgtggtccagcctgggaggtccctgagactctcctgtgcagcgtctggattcaccttcagtagctatggcatgcactgggtccgccaggctccaggcaaggggctggagtgggtggcagttatatcgtatgatggaagtaataaatactatgcagactccgtgaagggccgattcaccatctccagagacaattccaagaacacgctgtatctgcaaatgaacagcctgagagccgaggacacggcggtgtactactgcgcaaagggcaagcacagaaggaggtcattcgacatatggggtcagggtacaatggtcaccgtctcctca

SEQ ID NO: 413 - protein, 122 aa, Artificial sequence
  BIIB-12-910 VH Amino Acid Sequence
QVQLQESGPGLVKPSQTLSLTCTVSGGSISSGGYYWSWIRQHPGKGLEWIGSIYYSGSTYYNPSLKSRVTISVDTSKNQFSLKLSSVTAADTAVYYCARGPLQRQVRYFDLWGRGTLVTVSS

SEQ ID NO: 414 - DNA, 366 bp, Artificial sequence
  BIIB-12-910 VH Nucleic Acid Sequence
caggtgcagctgcaggagtcgggcccaggactggtgaagccttcacagaccctgtccctcacctgtactgtctctggtggctccatcagcagtggtggttactactggagctggatccgccagcacccagggaagggcctggagtggattgggtcaatctattacagtgggagcacctactacaacccgtccctcaagagtcgagttaccatatcagtagacacgtctaagaaccagttctccctgaagctgagttctgtgaccgccgcagacacggcggtgtactactgcgccagaggtcccttgcaaagacaagtgagatacttcgacctatgggggagaggtaccttggtcaccgtctcctca

SEQ ID NO: 415 - protein, 115 aa, Artificial sequence
  BIIB-12-911 VH Amino Acid Sequence
QVQLVESGGGVVQPGRSLRLSCAASGFTFSSYGMHWVRQAPGKGLEWVAVISYDGSNKYYADSVKGRFTISRDNSKNTLYLQMNSLRAEDTAVYYCARGRGMDVWGQGTTVTVSS

SEQ ID NO: 416 - DNA, 345 bp, Artificial sequence
  BIIB-12-911 VH Nucleic Acid Sequence
caggtgcagctggtggagtctgggggaggcgtggtccagcctgggaggtccctgagactctcctgtgcagcgtctggattcaccttcagtagctatggcatgcactgggtccgccaggctccaggcaaggggctggagtgggtggcagttatatcgtatgatggaagtaataaatactatgcagactccgtgaagggccgattcaccatctccagagacaattccaagaacacgctgtatctgcaaatgaacagcctgagagccgaggacacggcggtgtactactgcgccagaggcaggggaatggatgtatggggccagggaacaactgtcaccgtctcctca

SEQ ID NO: 417 - protein, 118 aa, Artificial sequence
  BIIB-12-912 VH Amino Acid Sequence
QVQLVESGGGVVQPGRSLRLSCAASGFTFSSYGMHWVRQAPGKGLEWVAVISYDGSNKYYADSVKGRFTISRDNSKNTLYLQMNSLRAEDTAVYYCAKSGGRYGYDIWGQGTMVTVSS

SEQ ID NO: 418 - DNA, 354 bp, Artificial sequence
  BIIB-12-912 VH Nucleic Acid Sequence
caggtgcagctggtggagtctgggggaggcgtggtccagcctgggaggtccctgagactctcctgtgcagcgtctggattcaccttcagtagctatggcatgcactgggtccgccaggctccaggcaaggggctggagtgggtggcagttatatcgtatgatggaagtaataaatactatgcagactccgtgaagggccgattcaccatctccagagacaattccaagaacacgctgtatctgcaaatgaacagcctgagagccgaggacacggcggtgtactactgcgccaagtccggtggaagatacgggtacgacatatggggtcagggtacaatggtcaccgtctcctca

SEQ ID NO: 419 - protein, 115 aa, Artificial sequence
  BIIB-12-913 VH Amino Acid Sequence
QVQLVQSGAEVKKPGASVKVSCKASGYTFTSYGISWVRQAPGQGLEWMGWISAYNGNTNYAQKLQGRVTMTTDTSTSTAYMELRSLRSDDTAVYYCARGGVSRFWGQGTLVTVSS

SEQ ID NO: 420 - DNA, 345 bp, Artificial sequence
  BIIB-12-913 VH Nucleic Acid Sequence
caggttcagctggtgcagtctggagctgaggtgaagaagcctggggcctcagtgaaggtctcctgcaaggcttctggttacacctttaccagctatggtatcagctgggtgcgacaggcccctggacaagggcttgagtggatgggatggatcagcgcttacaatggtaacacaaactatgcacagaagctccagggcagagtcaccatgaccacagacacatccacgagcacagcctacatggagctgaggagcctgagatctgacgacacggcggtgtactactgcgccagaggtggcgtgagtagattctggggacagggtacattggtcaccgtctcctca

SEQ ID NO: 421 - protein, 119 aa, Artificial sequence
  BIB-12-914 VH Amino Acid Sequence
QVQLVQSGAEVKKPGASVKVSCKASGYTFTSYYMHWVRQAPGQGLEWMGIINPSGGSTSYAQKFQGRVTMTRDTSTSTVYMELSSLRSEDTAVYYCARAPRYRGTMDVWGQGTTVTVSS

SEQ ID NO: 422 - DNA, 357 bp, Artificial sequence
  BIIB-12-914 VH Nucleic Acid Sequence
caggtgcagctggtgcagtctggggctgaggtgaagaagcctggggcctcagtgaaggtttcctgcaaggcatctggatacaccttcaccagctactatatgcactgggtgcgacaggcccctggacaagggcttgagtggatgggaataatcaaccctagtggtggtagcacaagctacgcacagaagttccagggcagagtcaccatgaccagggacacgtccacgagcacagtctacatggagctgagcagcctgagatctgaggacacggcggtgtactactgcgccagagcccctagataccgaggtaccatggatgtgtggggccagggaacaactgtcaccgtctcctca

SEQ ID NO: 423 - protein, 118 aa, Artificial sequence
  BIIB-12-915 VH Amino Acid Sequence
QLQLQESGPGLVKPSETLSLTCTVSGGSISSSRYYWGWIRQPPGKGLEWIGSIYYSGSTYYNPSLKSRVTISVDTSKNQFSLKLSSVTAADTAVYYCARVGGGYANPWGQGTLVTVSS

SEQ ID NO: 424 - DNA, 354 bp, Artificial sequence
  BIIB-12-915 VH Nucleic Acid Sequence
cagctgcagctgcaggagtcgggcccaggactggtgaagccttcggagaccctgtccctcacctgcactgtctctggtggctccatcagcagtagtcgctactactggggctggatccgccagcccccagggaaggggctggagtggattgggagtatctattatagtgggagcacctactacaacccgtccctcaagagtcgagtcaccatatccgtagacacgtccaagaaccagttctccctgaagctgagttctgtgaccgccgcagacacggcggtgtactactgcgccagagttggaggaggatacgccaacccatggggacagggtacattggtcaccgtctcctca

SEQ ID NO: 425 - protein, 121 aa, Artificial sequence
  BIIB-12-916 VH Amino Acid Sequence
QVQLVQSGAEVKKPGASVKVSCKASGYTFTSYYMHWVRQAPGQGLEWMGIINPSGGSTSYAQKFQGRVTMTRDTSTSTVYMELSSLRSEDTAVYYCARGGRQKATRRVDVWGQGTVVTVSS

SEQ ID NO: 426 - DNA, 363 bp, Artificial sequence
  BIIB-12-916 VH Nucleic Acid Sequence
caggtgcagctggtgcagtctggggctgaggtgaagaagcctggggcctcagtgaaggtttcctgcaaggcatctggatacaccttcaccagctactatatgcactgggtgcgacaggcccctggacaagggcttgagtggatgggaataatcaaccctagtggtggtagcacaagctacgcacagaagttccagggcagagtcaccatgaccagggacacgtccacgagcacagtctacatggagctgagcagcctgagatctgaggacacggcggtgtactactgcgccagaggaggtagacaaaaggcaacaaggagggtagacgtatggggtcagggtacagtggtcaccgtctcctca

SEQ ID NO: 427 - protein, 120 aa, Artificial sequence
  BIIB-12-917 VH Amino Acid Sequence
EVQLVQSGAEVKKPGESLKISCKGSGYSFTTYWIGWVRQMPGKGLEWMGIIYPGDSDTRYSPSFQGQVTISADKSISTAYLQWSSLKASDTAMYYCARGRFRPRGRFDYWGQGTLVTVSS

SEQ ID NO: 428 - DNA, 360 bp, Artificial sequence
  BIIB-12-917 VH Nucleic Acid Sequence
gaggtgcagctggtgcagtctggagcagaggtgaaaaagcccggggagtctctgaagatctcctgtaagggttctggatacagctttaccacctactggatcggctgggtgcgccagatgcccgggaaaggcctggagtggatggggatcatctatcctggtgactctgataccagatacagcccgtccttccaaggccaggtcaccatctcagccgacaagtccatcagcaccgcctacctgcagtggagcagcctgaaggcctcggacacggcgatgtactactgcgccagaggcagattcagacctagaggcagattcgactactggggacagggtacattggtcaccgtctcctca

SEQ ID NO: 429 - protein, 118 aa, Artificial sequence
  BIIB-12-918 VH Amino Acid Sequence
QVQLVESGGGVVQPGRSLRLSCAASGFTFSSYGMHWVRQAPGKGLEWVAVISYDGSNKYYADSVKGRFTISRDNSKNTLYLQMNSLRAEDTAVYYCAKSLGGRSFDIWGQGTMVTVSS

SEQ ID NO: 430 - DNA, 354 bp, Artificial sequence
  BIIB-12-918 VH Nucleic Acid Sequence
caggtgcagctggtggagtctgggggaggcgtggtccagcctgggaggtccctgagactctcctgtgcagcgtctggattcaccttcagtagctatggcatgcactgggtccgccaggctccaggcaaggggctggagtgggtggcagttatatcgtatgatggaagtaataaatactatgcagactccgtgaagggccgattcaccatctccagagacaattccaagaacacgctgtatctgcaaatgaacagcctgagagccgaggacacggcggtgtactactgcgcaaagagcttgggaggtagatcattcgacatatggggtcagggtacaatggtcaccgtctcctca

SEQ ID NO: 431 - protein, 122 aa, Artificial sequence
  BIIB-12-919 VH Amino Acid Sequence
QVQLVQSGAEVKKPGASVKVSCKASGYTFTSYYMHWVRQAPGQGLEWMGVINPSGGSTSYAQKFQGRVTMTRDTSTSTVYMELSSLRSEDTAVYYCARGANIAVGRRYADYWGQGTLVTVSS

SEQ ID NO: 432 - DNA, 366 bp, Artificial sequence
  BIIB-12-919 VH Nucleic Acid Sequence
caggtgcagctggtgcagtctggggctgaggtgaagaagcctggggcctcagtgaaggtttcctgcaaggcatctggatacaccttcaccagctactatatgcactgggtgcgacaggcccctggacaagggcttgagtggatgggagtcatcaaccctagtggtggtagcacaagctacgcacagaagttccagggcagagtcaccatgaccagggacacgtccacgagcacagtctacatggagctgagcagcctgagatctgaggacacggcggtgtactactgcgccagaggtgctaacatagcagtcggcagacgctacgcagactactggggacagggtacattggtcaccgtctcctca

SEQ ID NO: 433 - protein, 117 aa, Artificial sequence
  BIIB-12-920 VH Amino Acid Sequence
QVQLVQSGAEVKKPGASVKVSCKASGYTFTSYGISWVRQAPGQGLEWMGWISPYNGNTNYAQKLQGRVTMTTDTSTSTAYMELRSLRSDDTAVYYCARGSGHTTMFWGQGTLVTVSS

SEQ ID NO: 434 - DNA, 351 bp, Artificial sequence
  BIIB-12-920 VH Nucleic Acid Sequence
caggttcagctggtgcagtctggagctgaggtgaagaagcctggggcctcagtgaaggtctcctgcaaggcttctggttacacctttaccagctatggtatcagctgggtgcgacaggcccctggacaagggcttgagtggatgggatggatcagcccttacaatggtaacacaaactatgcacagaagctccagggcagagtcaccatgaccacagacacatccacgagcacagcctacatggagctgaggagcctgagatctgacgacacggcggtgtactactgcgccagagggtctggacacacaaccatgttctggggacagggtacattggtcaccgtctcctca

SEQ ID NO: 435 - protein, 120 aa, Artificial sequence
  BIIB-12-921 VH Amino Acid Sequence
QVQLVESGGGVVQPGRSLRLSCAASGFTFSSYGMHWVRQAPGKGLEWVAVISYDGSNKYYADSVKGRFTISRDNSKNTLYLQMNSLRAEDTAVYYCAKVGDRGTRAFDPWGQGTLVTVSS

SEQ ID NO: 436 - DNA, 360 bp, Artificial sequence
  BIIB-12-921 VH Nucleic Acid Sequence
caggtgcagctggtggagtctgggggaggcgtggtccagcctgggaggtccctgagactctcctgtgcagcgtctggattcaccttcagtagctatggcatgcactgggtccgccaggctccaggcaaggggctggagtgggtggcagttatatcgtatgatggaagtaataaatactatgcagactccgtgaagggccgattcaccatctccagagacaattccaagaacacgctgtatctgcaaatgaacagcctgagagccgaggacacggcggtgtactactgcgccaaggtaggagacagaggtacccgtgcattcgacccatggggacagggtacattggtcaccgtctcctca

SEQ ID NO: 437 - protein, 116 aa, Artificial sequence
  BIIB-12-922 VH Amino Acid Sequence
QVQLVQSGAEVKKPGASVKVSCKASGYTFTSYYMHWVRQAPGQGLEWMGIINPSGGSTSYAQKFQGRVTMTRDTSTSTVYMELSSLRSEDTAVYYCARRGRIAGMWGQGTTVTVSS

SEQ ID NO: 438 - DNA, 348 bp, Artificial sequence
  BIIB-12-922 VH Nucleic Acid Sequence
caggtgcagctggtgcagtctggggctgaggtgaagaagcctggggcctcagtgaaggtttcctgcaaggcatctggatacaccttcaccagctactatatgcactgggtgcgacaggcccctggacaagggcttgagtggatgggaataatcaaccctagtggtggtagcacaagctacgcacagaagttccagggcagagtcaccatgaccagggacacgtccacgagcacagtctacatggagctgagcagcctgagatctgaggacacggcggtgtactactgcgccagaagaggacgcatagcaggcatgtggggccagggaacaactgtcaccgtctcctca

SEQ ID NO: 439 - protein, 120 aa, Artificial sequence
  BIIB-12-923 VH Amino Acid Sequence
QVQLVQSGAEVKKPGASVKVSCKASGYTFTSYYMHWVRQAPGQGLEWMGIINPSGGSTSYAQKFQGRVTMTRDTSTSTVYMELSSLRSEDTAVYYCARGAGYLQRAFDIWGQGTMVTVSS

SEQ ID NO: 440 - DNA, 360 bp, Artificial sequence
  BIIB-12-923 VH Nucleic Acid Sequence
caggtgcagctggtgcagtctggggctgaggtgaagaagcctggggcctcagtgaaggtttcctgcaaggcatctggatacaccttcaccagctactatatgcactgggtgcgacaggcccctggacaagggcttgagtggatgggaataatcaaccctagtggtggtagcacaagctacgcacagaagttccagggcagagtcaccatgaccagggacacgtccacgagcacagtctacatggagctgagcagcctgagatctgaggacacggcggtgtactactgcgccagaggtgccggatatctacagagagccttcgatatatggggtcagggtacaatggtcaccgtctcctca

SEQ ID NO: 441 - protein, 119 aa, Artificial sequence
  BIIB-12-924 VH Amino Acid Sequence
QVQLVESGGGVVQPGRSLRLSCAASGFTFSSYGMHWVRQAPGKGLEWVAVISYDGSNKYYADSVKGRFTISRDNSKNTLYLQMNSLRAEDTAVYYCAKGKSSERGLNPWGQGTLVTVSS

SEQ ID NO: 442 - DNA, 357 bp, Artificial sequence
  BIIB-12-924 VH Nucleic Acid Sequence
caggtgcagctggtggagtctgggggaggcgtggtccagcctgggaggtccctgagactctcctgtgcagcgtctggattcaccttcagtagctatggcatgcactgggtccgccaggctccaggcaaggggctggagtgggtggcagttatatcgtatgatggaagtaataaatactatgcagactccgtgaagggccgattcaccatctccagagacaattccaagaacacgctgtatctgcaaatgaacagcctgagagccgaggacacggcggtgtactactgcgcaaagggcaagagctcggaacgaggtctcaacccatggggacagggtacattggtcaccgtctcctca

SEQ ID NO: 443 - protein, 121 aa, Artificial sequence
  BIIB-12-926 VH Amino Acid Sequence
QVQLVQSGAEVKKPGASVKVSCKASGYTFTSYYMHWVRQAPGQGLEWMGIINPSGGSTSYAQKFQGRVTMTRDTSTSTVYMELSSLRSEDTAVYYCARDGRMARGASPDYWGQGTLVTVSS

SEQ ID NO: 444 - DNA, 363 bp, Artificial sequence
  BIIB-12-926 VH Nucleic Acid Sequence
caggtgcagctggtgcagtctggggctgaggtgaagaagcctggggcctcagtgaaggtttcctgcaaggcatctggatacaccttcaccagctactatatgcactgggtgcgacaggcccctggacaagggcttgagtggatgggaataatcaaccctagtggtggtagcacaagctacgcacagaagttccagggcagagtcaccatgaccagggacacgtccacgagcacagtctacatggagctgagcagcctgagatctgaggacacggcggtgtactactgcgccagagacggcagaatggcaagaggtgctagcccagattactggggacagggtacattggtcaccgtctcctca

SEQ ID NO: 445 - protein, 121 aa, Artificial sequence
  BIIB-12-927 VH Amino Acid Sequence
QVQLVQSGAEVKKPGASVKVSCKASGYTFTSYYMSWVRQAPGQGLEWMGIINPSGGSTSYAQKFQGRVTMTRDTSTSTVYMELSSLRSEDTAVYYCARDSGRKRYYYMDVWGKGTTVTVSS

SEQ ID NO: 446 - DNA, 363 bp, Artificial sequence
  BIIB-12-927 VH Nucleic Acid Sequence
caggtgcagctggtgcagtctggggctgaggtgaagaagcctggggcctcagtgaaggtttcctgcaaggcatctggatacaccttcaccagctactatatgtcatgggtgcgacaggcccctggacaagggcttgagtggatgggaataatcaaccctagtggtggtagcacaagctacgcacagaagttccagggcagagtcaccatgaccagggacacgtccacgagcacagtctacatggagctgagcagcctgagatctgaggacacggcggtgtactactgcgccagagactcaggaaggaaaagatactactacatggacgtatggggcaagggtacaactgtcaccgtctcctca

SEQ ID NO: 447 - protein, 116 aa, Artificial sequence
  BIIB-12-928 VH Amino Acid Sequence
QVQLVEFGVGVVQPGRSLRLSCAASGFTFSSYGMHWVRQAPGKGLEWVAVISYDGSNKYYADSVKGRFTISRDNSKNTLYLQMNSLRAEDTAVYYCAKGGTYLDTWGQGTLVTVSS

SEQ ID NO: 448 - DNA, 348 bp, Artificial sequence
  BIIB-12-928 VH Nucleic Acid Sequence
caggtgcagctggtggagtttggggtaggcgtggtccagcctgggaggtccctgagactctcctgtgcagcgtctggattcaccttcagtagctatggcatgcactgggtccgccaggctccaggcaaggggctggagtgggtggcagttatatcgtatgatggaagtaataaatactatgcagactccgtgaagggccgattcaccatctccagagacaattccaagaacacgctgtatctgcaaatgaacagcctgagagccgaggacacggcggtgtactactgcgccaagggcggaacatacttagacacttggggacagggtacattggtcaccgtctcctca

SEQ ID NO: 449 - protein, 119 aa, Artificial sequence
  BIIB-12-929 VH Amino Acid Sequence
QVQLVQSGAEVKKPGASVKVSCKASGYTFTSYYMHWVRQAPGQGLEWMGIINPSGGSTSYAQKFQGRVTMTRDTSTSTVYMELSSLRSEDTAVYYCARDQGYSRSFDIWGQGTMVTVSS

SEQ ID NO: 450 - DNA, 357 bp, Artificial sequence
  BIIB-12-929 VH Nucleic Acid Sequence
caggtgcagctggtgcagtctggggctgaggtgaagaagcctggggcctcagtgaaggtttcctgcaaggcatctggatacaccttcaccagctactatatgcactgggtgcgacaggcccctggacaagggcttgagtggatgggaataatcaaccctagtggtggtagcacaagctacgcacagaagttccagggcagagtcaccatgaccagggacacgtccacgagcacagtctacatggagctgagcagcctgagatctgaggacacggcggtgtactactgcgccagggaccagggatactcaaggtcattcgacatatggggtcagggtacaatggtcaccgtctcctca

SEQ ID NO: 451 - protein, 120 aa, Artificial sequence
  BIIB-12-930 VH Amino Acid Sequence
QVQLVQSGAEVKKPGASVKVSCKASGYTFTSYYMHWVRQAPGQGLEWMGIINPSGGSTSYAQKFQGRVTMTRDTSTSTVYMELSSLRSEDTAVYYCARVRQKATLLFQHWGQGTLVTVSS

SEQ ID NO: 452 - DNA, 360 bp, Artificial sequence
  BIIB-12-930 VH Nucleic Acid Sequence
caggtgcagctggtgcagtctggggctgaggtgaagaagcctggggcctcagtgaaggtttcctgcaaggcatctggatacaccttcaccagctactatatgcactgggtgcgacaggcccctggacaagggcttgagtggatgggaataatcaaccctagtggtggtagcacaagctacgcacagaagttccagggcagagtcaccatgaccagggacacgtccacgagcacagtctacatggagctgagcagcctgagatctgaggacacggcggtgtactactgcgccagggtcagacaaaaggcaacattgttgttccaacactggggacagggtacattggtcaccgtctcctca

SEQ ID NO: 453 - protein, 124 aa, Artificial sequence
  BIIB-12-931 VH Amino Acid Sequence
QVQLVQSGAEVKKPGASVKVSCKASGYTFTSYYMSWVRQAPGQGLEWMGIINPSGGSTSYAQKFQGRVTMTRDTSTSTVYMELSSLRSEDTAVYYCARDPVQEYGPYYYYMDVWGKGTTVTVSS

SEQ ID NO: 454 - DNA, 372 bp, Artificial sequence
  BIIB-12-931 VH Nucleic Acid Sequence
caggtgcagctggtgcagtctggggctgaggtgaagaagcctggggcctcagtgaaggtttcctgcaaggcatctggatacaccttcaccagctactatatgtcatgggtgcgacaggcccctggacaagggcttgagtggatgggaataatcaaccctagtggtggtagcacaagctacgcacagaagttccagggcagagtcaccatgaccagggacacgtccacgagcacagtctacatggagctgagcagcctgagatctgaggacacggcggtgtactactgcgccagagatccggtgcaggagtacggcccctactactactacatggacgtatggggcaagggtacaactgtcaccgtctcctca

SEQ ID NO: 455 - protein, 120 aa, Artificial sequence
  BIIB-12-932 VH Amino Acid Sequence
QVQLVESGGGVVQPGRSLRLSCAASGFTFSSYGMHWVRQAPGKGLEWVAVISYDGSNKYYADSVKGRFTISRDNSKNTLYLQMNSLRAEDTAVYYCARLGYRGASAFDIWGQGTMVTVSS

SEQ ID NO: 456 - DNA, 360 bp, Artificial sequence
  BIIB-12-932 VH Amino Acid Sequence
caggtgcagctggtggagtctgggggaggcgtggtccagcctgggaggtccctgagactctcctgtgcagcgtctggattcaccttcagtagctatggcatgcactgggtccgccaggctccaggcaaggggctggagtgggtggcagttatatcgtatgatggaagtaataaatactatgcagactccgtgaagggccgattcaccatctccagagacaattccaagaacacgctgtatctgcaaatgaacagcctgagagccgaggacacggcggtgtactactgcgccagattgggatacagaggggcctcagctttcgacatatggggtcagggtacaatggtcaccgtctcctca

SEQ ID NO: 457 - protein, 118 aa, Artificial sequence
  BIIB-12-933 VH Amino Acid Sequence
QVQLVESGGGVVQPGRSLRLSCAASGFTFSSYGMHWVRQAPGKGLEWVAVISYDGSNKYYADSVKGRFTISRDNSKNTLYLQMNSLRAEDTAVYYCARLPRFTGTAYWGQGTLVTVSS

SEQ ID NO: 458 - DNA, 354 bp, Artificial sequence
  BIIB-12-933 VH Nucleic Acid Sequence
caggtgcagctggtggagtctgggggaggcgtggtccagcctgggaggtccctgagactctcctgtgcagcgtctggattcaccttcagtagctatggcatgcactgggtccgccaggctccaggcaaggggctggagtgggtggcagttatatcgtatgatggaagtaataaatactatgcagactccgtgaagggccgattcaccatctccagagacaattccaagaacacgctgtatctgcaaatgaacagcctgagagccgaggacacggcggtgtactactgcgccagacttcctagattcactggtaccgcttactggggacagggtacattggtcaccgtctcctca

SEQ ID NO: 459 - protein, 120 aa, Artificial sequence
  BIIB-12-934 VH Amino Acid Sequence
QVQLVESGGGVVQPGRSLRLSCAASGFTFSSYGMHWVRQAPGKGLEWVAVISYDGSNKYYADSVKGRFTISRDNSKNTLYLQMNSLRAEDTAVYYCARESGGHSYGMDVWGQGTTVTVSS

SEQ ID NO: 460 - DNA, 360 bp, Artificial sequence
  BIIB-12-934 VH Nucleic Acid Sequence
caggtgcagctggtggagtctgggggaggcgtggtccagcctgggaggtccctgagactctcctgtgcagcgtctggattcaccttcagtagctatggcatgcactgggtccgccaggctccaggcaaggggctggagtgggtggcagttatatcgtatgatggaagtaataaatactatgcagactccgtgaagggccgattcaccatctccagagacaattccaagaacacgctgtatctgcaaatgaacagcctgagagccgaggacacggcggtgtactactgcgccagagagtctggaggtcacagctacggaatggacgtatggggccagggaacaactgtcaccgtctcctca

SEQ ID NO: 461 - protein, 120 aa, Artificial sequence
  BIIB-12-935 VH Amino Acid Sequence
QVQLVESGGGVVQPGRSLRLSCAASGFTFSSYGMHWVRQAPGKGLEWVAVISYDGSNKYYADSVKGRFTISRDNSKNTLYLQMNSLRAEDTAVYYCARELEYGHYGMDVWGQGTTVTVSS

SEQ ID NO: 462 - DNA, 360 bp, Artificial sequence
  BIIB-12-935 VH Nucleic Acid Sequence
caggtgcagctggtggagtctgggggaggcgtggtccagcctgggaggtccctgagactctcctgtgcagcgtctggattcaccttcagtagctatggcatgcactgggtccgccaggctccaggcaaggggctggagtgggtggcagttatatcgtatgatggaagtaataaatactatgcagactccgtgaagggccgattcaccatctccagagacaattccaagaacacgctgtatctgcaaatgaacagcctgagagccgaggacacggcggtgtactactgcgccagagagttggaatatgggcattacggaatggacgtatggggccagggaacaactgtcaccgtctcctca

SEQ ID NO: 463 - protein, 121 aa, Artificial sequence
  BIIB-12-936 VH Amino Acid Sequence
EVQLLESGGGLVQPGGSLRLSCAASGFTFSSYAMSWVRQAPGKGLEWVSAISGSGGSTYYADSVKGRFTISRDNSKNTLYLQMNSLRAEDTAVYYCAKDGGWYEAYGMDVWGQGTTVTVSS

SEQ ID NO: 464 - DNA, 363 bp, Artificial sequence
  BIIB-12-936 VH Nucleic Acid Sequence
gaggtgcagctgttggagtctgggggaggcttggtacagcctggggggtccctgagactctcctgtgcagcctctggattcacctttagcagctatgccatgagctgggtccgccaggctccagggaaggggctggagtgggtctcagctattagtggtagtggtggtagcacatactacgcagactccgtgaagggccggttcaccatctccagagacaattccaagaacacgctgtatctgcaaatgaacagcctgagagccgaggacacggcggtgtactactgcgccaaggacggtggatggtacgaggcatacggaatggacgtatggggccagggaacaactgtcaccgtctcctca

SEQ ID NO: 465 - protein, 121 aa, Artificial sequence
  BIIB-12-937 VH Amino Acid Sequence
QVQLVQSGAEVKKPGASVKVSCKASGYTFTSYYMHWVRQAPGQGLEWMGIINPSGGSTSYAQKFQGRVTMTRDTSTSTVYMELSSLRSEDTAVYYCARPTRMLRSYGMDVWGQGTTVTVSS

SEQ ID NO: 466 - DNA, 363 bp, Artificial sequence
  BIIB-12-937 VH Nucleic Acid Sequence
caggtgcagctggtgcagtctggggctgaggtgaagaagcctggggcctcagtgaaggtttcctgcaaggcatctggatacaccttcaccagctactatatgcactgggtgcgacaggcccctggacaagggcttgagtggatgggaataatcaaccctagtggtggtagcacaagctacgcacagaagttccagggcagagtcaccatgaccagggacacgtccacgagcacagtctacatggagctgagcagcctgagatctgaggacacggcggtgtactactgcgccagacctactaggatgttaaggagctacggaatggacgtatggggccagggaacaactgtcaccgtctcctca

SEQ ID NO: 467 - protein, 126 aa, Artificial sequence
  BIIB-12-1288 VH Amino Acid Sequence
QVQLVQSGAEVKKPGASVKVSCKASGYTFTSYYMHWVRQAPGQGLEWMGIINPSGGSTSYAQKFQGRVTMTRDTSTSTVYMELSSLRSEDTAVYYCARGGANDYGSSSRWWYFDLWGRGTLVTVSS

SEQ ID NO: 468 - DNA, 378 bp, Artificial sequence
  BIIB-12-1288 VH Nucleic Acid Sequence
caggtgcagctggtgcagtctggggctgaggtgaagaagcctggggcctcagtgaaggtttcctgcaaggcatctggatacaccttcaccagctactatatgcactgggtgcgacaggcccctggacaagggcttgagtggatgggaataatcaaccctagtggtggtagcacaagctacgcacagaagttccagggcagagtcaccatgaccagggacacgtccacgagcacagtctacatggagctgagcagcctgagatctgaggacacggcggtgtactactgcgccagaggaggtgctaacgactacggcagcagcagccgatggtggtacttcgacttatgggggagaggtaccttggtcaccgtctcctca

SEQ ID NO: 469 - protein, 125 aa, Artificial sequence
  BIIB-12-1289 VH Amino Acid Sequence
QVQLVQSGAEVKKPGASVKVSCKASGYTFTSYYMHWVRQAPGQGLEWMGIINPGGGSTSYAQKFQGRVTMTRDTSTSTVYMELSSLRSEDTAVYYCARGPPRTYATGSHNWFDPWGQGTLVTVSS

SEQ ID NO: 470 - DNA, 375 bp, Artificial sequence
  BIIB-12-1289 VH Nucleic Acid Sequence
caggtgcagctggtgcagtctggggctgaggtgaagaagcctggggcctcagtgaaggtttcctgcaaggcatctggatacaccttcaccagctactatatgcactgggtgcgacaggcccctggacaagggcttgagtggatgggaataatcaaccctggtggtggtagcacaagctacgcacagaagttccagggcagagtcaccatgaccagggacacgtccacgagcacagtctacatggagctgagcagcctgagatctgaggacacggcggtgtactactgcgccagaggaccgcctagaacctacgcaaccggaagccacaattggttcgacccctggggacagggtacattggtcaccgtctcctca

SEQ ID NO: 471 - protein, 120 aa, Artificial sequence
  BIIB-12-1290 VH Amino Acid Sequence
QVQLVQSGAEVKKPGASVKVSCKASGYTFTSYYMHWVRQAPGQGLEWMGIINPGGGSTSYAQKFQGRVTMTRDTSTSTVYMELSSLRSEDTAVYYCAREGGRYVRGMDVWGQGTTVTVSS

SEQ ID NO: 472 - DNA, 360 bp, Artificial sequence
  BIIB-12-1290 VH Nucleic Acid Sequence
caggtgcagctggtgcagtctggggctgaggtgaagaagcctggggcctcagtgaaggtttcctgcaaggcatctggatacaccttcaccagctactatatgcactgggtgcgacaggcccctggacaagggcttgagtggatgggaataatcaaccctggtggtggtagcacaagctacgcacagaagttccagggcagagtcaccatgaccagggacacgtccacgagcacagtctacatggagctgagcagcctgagatctgaggacacggcggtgtactactgcgccagagagggaggaagatacgtgagaggaatggacgtatggggccagggaacaactgtcaccgtctcctca

SEQ ID NO: 473 - protein, 120 aa, Artificial sequence
  BIIB-12-1291 VH Amino Acid Sequence
QVQLVQSGAEVKKPGASVKVSCKASGYTFTSYYMHWVRQAPGQGLEWMGIINPSGGSTSYAQKFQGRVTMTRDTSTSTVYMELSSLRSEDTAVYYCARSRRMWVGYFDLWGRGTLVTVSS

SEQ ID NO: 474 - DNA, 360 bp, Artificial sequence
  BIIB-12-1291 VH Nucleic Acid Sequence
caggtgcagctggtgcagtctggggctgaggtgaagaagcctggggcctcagtgaaggtttcctgcaaggcatctggatacaccttcaccagctactatatgcactgggtgcgacaggcccctggacaagggcttgagtggatgggaataatcaaccctagtggtggtagcacaagctacgcacagaagttccagggcagagtcaccatgaccagggacacgtccacgagcacagtctacatggagctgagcagcctgagatctgaggacacggcggtgtactactgcgctagatcaagaaggatgtgggtaggctacttcgacctatgggggagaggtaccttggtcaccgtctcctca

SEQ ID NO: 475 - protein, 121 aa, Artificial sequence
  BIIB-12-1292 VH Amino Acid Sequence
QVQLVQSGAEVKKPGASVKVSCKASGYTFTSYYIHWVRQAPGQGLEWMGIINPSGGSTSYAQKFQGRVTMTRDTSTSTVYMELSSLRSEDTAVYYCARDPGRRQSSGFDYWGQGTLVTVSS

SEQ ID NO: 476 - DNA, 363 bp, Artificial sequence
  BIIB-12-1292 VH Nucleic Acid Sequence
caggtgcagctggtgcagtctggggctgaggtgaagaagcctggggcctcagtgaaggtttcctgcaaggcatctggatacaccttcaccagctactatatccactgggtgcgacaggcccctggacaagggcttgagtggatgggaataatcaaccctagtggtggtagcacaagctacgcacagaagttccagggcagagtcaccatgaccagggacacgtccacgagcacagtctacatggagctgagcagcctgagatctgaggacacggcggtgtactactgcgccagagatccaggaagaaggcaaagttctggattcgattactggggacagggtacattggtcaccgtctcctca

SEQ ID NO: 477 - protein, 120 aa, Artificial sequence
  BIIB-12-1293 VH Amino Acid Sequence
QVQLVQSGAEVKKPGASVKVSCKASGYTFTSYYMHWVRQAPGQGLEWMGIINPSGGSTSYAQKFQGRVTMTRDTSTSTVYMELSSLRSEDTAVYYCARGSGGKHRGLDVWGQGTMVTVSS

SEQ ID NO: 478 - DNA, 360 bp, Artificial sequence
  BIIB-12-1293 VH Nucleic Acid Sequence
caggtgcagctggtgcagtctggggctgaggtgaagaagcctggggcctcagtgaaggtttcctgcaaggcatctggatacaccttcaccagctactatatgcactgggtgcgacaggcccctggacaagggcttgagtggatgggaataatcaaccctagtggtggtagcacaagctacgcacagaagttccagggcagagtcaccatgaccagggacacgtccacgagcacagtctacatggagctgagcagcctgagatctgaggacacggcggtgtactactgcgccagaggctctggaggcaaacacagaggtctagacgtatggggtcagggtacaatggtcaccgtctcctca

SEQ ID NO: 479 - protein, 119 aa, Artificial sequence
  BIIB-12-1294 VH Amino Acid Sequence
QVQLVQSGAEVKKPGASVKVSCKASGYTFTSYYMHWVRQAPGQGLEWMGIINPSGGSTSYAQKFQGRVTMTRDTSTSTVYMELSSLRSEDTAVYYCARGTRSSRDMDVWGQGTTVTVSS

SEQ ID NO: 480 - DNA, 357 bp, Artificial sequence
  BIIB-12-1294 VH Nucleic Acid Sequence
caggtgcagctggtgcagtctggggctgaggtgaagaagcctggggcctcagtgaaggtttcctgcaaggcatctggatacaccttcaccagctactatatgcactgggtgcgacaggcccctggacaagggcttgagtggatgggaataatcaaccctagtggtggtagcacaagctacgcacagaagttccagggcagagtcaccatgaccagggacacgtccacgagcacagtctacatggagctgagcagcctgagatctgaggacacggcggtgtactactgcgccagaggcactagatccagcagagacatggatgtgtggggccagggaacaactgtcaccgtctcctca

SEQ ID NO: 481 - protein, 124 aa, Artificial sequence
  BIIB-12-1295 VH Amino Acid Sequence
QVQLVQSGAEVKKPGASVKVSCKASGYTFTSYYMVWVRQAPGQGLEWMGIINPSGGSTSYAQKFQGRVTMTRDTSTSTVYMELSSLRSEDTAVYYCARVGGATTGKIGYGMDVWGQGTTVTVSS

SEQ ID NO: 482 - DNA, 372 bp, Artificial sequence
  BIIB-12-1295 VH Nucleic Acid Sequence
caggtgcagctggtgcagtctggggctgaggtgaagaagcctggggcctcagtgaaggtttcctgcaaggcatctggatacaccttcaccagctactatatggtctgggtgcgacaggcccctggacaagggcttgagtggatgggaataatcaaccctagtggtggtagcacaagctacgcacagaagttccagggcagagtcaccatgaccagggacacgtccacgagcacagtctacatggagctgagcagcctgagatctgaggacacggcggtgtactactgcgccagagttggaggagccaccacagggaaaatcggatacggaatggacgtatggggccagggaacaactgtcaccgtctcctca

SEQ ID NO: 483 - protein, 122 aa, Artificial sequence
  BIIB-12-1296 VH Amino Acid Sequence
EVQLLESGGGLVQPGGSLRLSCAASGFTFSTYAMSWVRQAPGKGLEWVSAISGSGGSTYYADSVKGRFTISRDNSKNTLYLQMNSLRAEDTAVYYCAKGPPHYYYLWYFDLWGRGTLVTVSS

SEQ ID NO: 484 - DNA, 366 bp, Artificial sequence
  BIIB-12-1296 VH Nucleic Acid Sequence
gaggtgcagctgttggagtctgggggaggcttggtacagcctggggggtccctgagactctcctgtgcagcctctggattcacctttagcacctatgccatgagctgggtccgccaggctccagggaaggggctggagtgggtctcagctattagtggtagtggtggtagcacatactacgcagactccgtgaagggccggttcaccatctccagagacaattccaagaacacgctgtatctgcaaatgaacagcctgagagccgaggacacggcggtgtactactgcgccaagggccctcctcactactactatctctggtacttcgacctatgggggagaggtaccttggtcaccgtctcctca

SEQ ID NO: 485 - protein, 121 aa, Artificial sequence
  BIIB-12-1297 VH Amino Acid Sequence
QVQLVESGGGVVQPGRSLRLSCAASGFTFSSYGMHWVRQAPGKGLEWVAVISYDGSNKYYADSVKGRFTISRDNSKNTLYLQMNSLRAEDTAVYYCARSGGQTHRRSMDVWGQGTTVTVSS

SEQ ID NO: 486 - DNA, 363 bp, Artificial sequence
  BIIB-12-1297 VH Nucleic Acid Sequence
caggtgcagctggtggagtctgggggaggcgtggtccagcctgggaggtccctgagactctcctgtgcagcgtctggattcaccttcagtagctatggcatgcactgggtccgccaggctccaggcaaggggctggagtgggtggcagttatatcgtatgatggaagtaataaatactatgcagactccgtgaagggccgattcaccatctccagagacaattccaagaacacgctgtatctgcaaatgaacagcctgagagccgaggacacggcggtgtactactgcgccagatcaggcggacaaacacacaggaggtcaatggacgtatggggccagggaacaactgtcaccgtctcctca

SEQ ID NO: 487 - protein, 118 aa, Artificial sequence
  BIIB-12-1298 VH Amino Acid Sequence
QVQLVESGGGVVQPGRSLRLSCAASGFTFSSYGMHWVRQAPGKGLEWVAVISYDGSNKYYADSVKGRFTISRDNSKNTLYLQMNSLRAEDTAVYYCAKGGSDRRVGSWGQGTLVTVSS

SEQ ID NO: 488 - DNA, 354 bp, Artificial sequence
  BIIB-12-1298 VH Nucleic Acid Sequence
caggtgcagctggtggagtctgggggaggcgtggtccagcctgggaggtccctgagactctcctgtgcagcgtctggattcaccttcagtagctatggcatgcactgggtccgccaggctccaggcaaggggctggagtgggtggcagttatatcgtatgatggaagtaataaatactatgcagactccgtgaagggccgattcaccatctccagagacaattccaagaacacgctgtatctgcaaatgaacagcctgagagccgaggacacggcggtgtactactgcgccaagggaggttctgaccgcagagtgggcagttggggacagggtacattggtcaccgtctcctca

SEQ ID NO: 489 - protein, 118 aa, Artificial sequence
  BIIB-12-1299 VH Amino Acid Sequence
QVQLVESGGGVVQPGRSLRLSCAASGFTFSSYGMHWVRQAPGKGLEWVAVISYDGSNKYYADSVKGRFTISRDNSKNTLYLQMNSLRAEDTAVYYCARGGSRRAYVYWGQGTLVTVSS

SEQ ID NO: 490 - DNA, 354 bp, Artificial sequence
  BIIB-12-1299 VH Nucleic Acid Sequence
caggtgcagctggtggagtctgggggaggcgtggtccagcctgggaggtccctgagactctcctgtgcagcgtctggattcaccttcagtagctatggcatgcactgggtccgccaggctccaggcaaggggctggagtgggtggcagttatatcgtatgatggaagtaataaatactatgcagactccgtgaagggccgattcaccatctccagagacaattccaagaacacgctgtatctgcaaatgaacagcctgagagccgaggacacggcggtgtactactgcgccagaggcggttctagaagggcctacgtttattggggacagggtacattggtcaccgtctcctca

SEQ ID NO: 491 - protein, 116 aa, Artificial sequence
  BIIB-12-1300 VH Amino Acid Sequence
QVQLVESGGGVVQPGRSLRLSCAASGFTFSSYGMHWVRQAPGKGLEWVAVISYDGSNKYYADSVKGRFTISRDNSKNTLYLQMNSLRAEDTAVYYCARGSKYLHAWGQGTLVTVSS

SEQ ID NO: 492 - DNA, 347 bp, Artificial sequence
  BIIB-12-1300 VH Nucleic Acid Sequence
aggtgcagctggtggagtctgggggaggcgtggtccagcctgggaggtccctgagactctcctgtgcagcgtctggattcaccttcagtagctatggcatgcactgggtccgccaggctccaggcaaggggctggagtgggtggcagttatatcgtatgatggaagtaataaatactatgcagactccgtgaagggccgattcaccatctccagagacaattccaagaacacgctgtatctgcaaatgaacagcctgagagccgaggacacggcggtgtactactgcgccagaggttctaaatacctccacgcatggggacagggtacattggtcaccgtctcctca

SEQ ID NO: 493 - protein, 119 aa, Artificial sequence
  BIIB-12-1301 VH Amino Acid Sequence
QVQLVESGGGVVQPGRSLRLSCAASGFTFSSYGMHWVRQAPGKGLEWVAVISYDGSNKYYADSVKGRFTISRDNSKNTLYLQMNSLRAEDTAVYYCARTGNYGRGMPYWGQGTLVTVSS

SEQ ID NO: 494 - DNA, 357 bp, Artificial sequence
  BIIB-12-1301 VH Nucleic Acid Sequence
caggtgcagctggtggagtctgggggaggcgtggtccagcctgggaggtccctgagactctcctgtgcagcgtctggattcaccttcagtagctatggcatgcactgggtccgccaggctccaggcaaggggctggagtgggtggcagttatatcgtatgatggaagtaataaatactatgcagactccgtgaagggccgattcaccatctccagagacaattccaagaacacgctgtatctgcaaatgaacagcctgagagccgaggacacggcggtgtactactgcgccagaactggaaactacggaaggggaatgccatactggggacagggtacattggtcaccgtctcctca

SEQ ID NO: 495 - protein, 119 aa, Artificial sequence
  BIIB-12-1302 VH Amino Acid Sequence
QVQLVQSGAEVKKPGASVKVSCKASGYTFTNYGISWVRQAPGQGLEWMGWISAYNGNTNYAQKLQGRVTMTTDTSTSTAYMELRSLRSDDTAVYYCARARSDWRAFDIWGQGTMVTVSS

SEQ ID NO: 496 - DNA, 357 bp, Artificial sequence
  BIIB-12-1302 VH Nucleic Acid Sequence
caggttcagctggtgcagtctggagctgaggtgaagaagcctggggcctcagtgaaggtctcctgcaaggcttctggttacacctttaccaactatggtatcagctgggtgcgacaggcccctggacaagggcttgagtggatgggatggatcagcgcttacaatggtaacacaaactatgcacagaagctccagggcagagtcaccatgaccacagacacatccacgagcacagcctacatggagctgaggagcctgagatctgacgacacggcggtgtactactgcgcaagggctagaagtgactggagagccttcgatatatggggtcagggtacaatggtcaccgtctcctca

SEQ ID NO: 497 - protein, 117 aa, Artificial sequence
  BIIB-12-1303 VH Amino Acid Sequence
QVQLVESGGGVVQPGRSLRLSCAASGFTFSSYGMHWVRQAPGKGLEWVAVISYDGSNKYYADSVKGRFTISRDNSKNTLYLQMNSLRAEDTAVYYCARGPTSRLFQHWGQGTLVTVS

SEQ ID NO: 498 - DNA, 354 bp, Artificial sequence
  BIIB-12-1303 VH Nucleic Acid Sequence
caggtgcagctggtggagtctgggggaggcgtggtccagcctgggaggtccctgagactctcctgtgcagcgtctggattcaccttcagtagctatggcatgcactgggtccgccaggctccaggcaaggggctggagtgggtggcagttatatcgtatgatggaagtaataaatactatgcagactccgtgaagggccgattcaccatctccagagacaattccaagaacacgctgtatctgcaaatgaacagcctgagagccgaggacacggcggtgtactactgcgccagaggacccactagtaggttattccaacactggggacagggtacattggtcaccgtctcctca

SEQ ID NO: 499 - protein, 118 aa, Artificial sequence
  BIIB-12-1304 VH Amino Acid Sequence
QVQLVESGGGVVQPGRSLRLSCAASGFTFSSYGMHWVRQAPGKGLEWVAVISYDGSNKYYADSVKGRFTISRDNSKNTLYLQMNSLRAEDTAVYYCAKGPGSRRFDIWGQGTMVTVSS

SEQ ID NO: 500 - DNA, 354 bp, Artificial sequence
  BIIB-12-1304 VH Nucleic Acid Sequence
caggtgcagctggtggagtctgggggaggcgtggtccagcctgggaggtccctgagactctcctgtgcagcgtctggattcaccttcagtagctatggcatgcactgggtccgccaggctccaggcaaggggctggagtgggtggcagttatatcgtatgatggaagtaataaatactatgcagactccgtgaagggccgattcaccatctccagagacaattccaagaacacgctgtatctgcaaatgaacagcctgagagccgaggacacggcggtgtactactgcgccaaggggcctggaagtaggaggttcgacatatggggtcagggtacaatggtcaccgtctcctca

SEQ ID NO: 501 - protein, 120 aa, Artificial sequence
  BIIB-12-1305 VH Amino Acid Sequence
QVQLVESGGGVVQPGRSLRLSCAASGFTFSSYGMHWVRQAPGKGLEWVAVISYDGSNKYYADSVKGRFTISRDNSKNTLYLQMNSLRAEDTAVYYCAKLGGRWSSDFQHWGQGTLVTVSS

SEQ ID NO: 502 - DNA, 360 bp, Artificial sequence
  BIIB-12-1305 VH Nucleic Acid Sequence
caggtgcagctggtggagtctgggggaggcgtggtccagcctgggaggtccctgagactctcctgtgcagcgtctggattcaccttcagtagctatggcatgcactgggtccgccaggctccaggcaaggggctggagtgggtggcagttatatcgtatgatggaagtaataaatactatgcagactccgtgaagggccgattcaccatctccagagacaattccaagaacacgctgtatctgcaaatgaacagcctgagagccgaggacacggcggtgtactactgcgccaagctaggcggaagatggagttctgacttccaacactggggacagggtacattggtcaccgtctcctca

SEQ ID NO: 503 - protein, 117 aa, Artificial sequence
  BIIB-12-1306 VH Amino Acid Sequence
QVQLQESGPGLVKPSQTLSLTCTVSGGSISSGGYYWSWIRQHPGKGLEWIGSIYYSGSTYYNPSLKSRVTISVDTSKNQFSLKLSSVTAADTAVYYCARGAGGSAPWGQGTLVTVSS

SEQ ID NO: 504 - DNA, 351 bp, Artificial sequence
  BIIB-12-1306 VH Nucleic Acid Sequence
caggtgcagctgcaggagtcgggcccaggactggtgaagccttcacagaccctgtccctcacctgtactgtctctggtggctccatcagcagtggtggttactactggagctggatccgccagcacccagggaagggcctggagtggattgggtcaatctattacagtgggagcacctactacaacccgtccctcaagagtcgagttaccatatcagtagacacgtctaagaaccagttctccctgaagctgagttctgtgaccgccgcagacacggcggtgtactactgcgccagaggtgccggaggatctgccccatggggacagggtacattggtcaccgtctcctca

SEQ ID NO: 505 - protein, 122 aa, Artificial sequence
  BIIB-12-1307 VH Amino Acid Sequence
QVQLQESGPGLVKPSETLSLTCAVSGYSISSGYYWAWIRQPPGKGLEWIGSIYHSGSTYYNPSLKSRVTISVDTSKNQFSLKLSSVTAADTAVYYCARGPLPRSRGLAFDIWGQGTMVTVSS

SEQ ID NO: 506 - DNA, 366 bp, Artificial sequence
  BIIB-12-1307 VH Nucleic Acid Sequence
caggtgcagctgcaggagtcgggcccaggactggtgaagccttcggagaccctgtccctcacctgcgctgtctctggttactccatcagcagtggttactactgggcttggatccggcagcccccagggaaggggctggagtggattgggagtatctatcatagtgggagcacctactacaacccgtccctcaagagtcgagtcaccatatcagtagacacgtccaagaaccagttctccctgaagctgagttctgtgaccgccgcagacacggcggtgtactactgcgccagaggtcccttgccaagatctagaggcttagccttcgatatctggggtcagggtacaatggtcaccgtctcctca

SEQ ID NO: 507 - protein, 120 aa, Artificial sequence
  BIIB-12-1308 VH Amino Acid Sequence
QVQLVESGGGVVQPGRSLRLSRAASGFTFSSYGMHWVRQAPGKGLEWVAVISYDGSNKYYADSVKGRFTISRDNSKNTLYLQMNSLRAEDTAVYYCARGPRALGTAFDIWGQGTMVTVSS

SEQ ID NO: 508 - DNA, 360 bp, Artificial sequence
  BIIB-12-1308 VH Nucleic Acid Sequence
caggtgcagctggtggagtctgggggaggcgtggtccagcctgggaggtccctgagactatccagagcagcgtctggattcaccttcagtagctatggcatgcactgggtccgccaggctccaggcaaggggctggagtgggtggcagttatatcgtatgatggaagtaataaatactatgcagactccgtgaagggccgattcaccatctccagagacaattccaagaacacgctgtatctgcaaatgaacagcctgagagccgaggacacggcggtgtactactgcgccagaggaccaagagcattgggaaccgcattcgacatatggggtcagggtacaatggtcaccgtctcctca

SEQ ID NO: 509 - protein, 119 aa, Artificial sequence
  BIIB-12-1309 VH Amino Acid Sequence
QVQLVESGGGVVQPGRSLRLSCAASGFTFSSYGMHWVRQAPGKGLEWVAVISYDGSNKYYADSVKGRFTISRDNSKNTLYLQMNSLRAEDTAVYYCARGRYTSRYFQHWGQGTLVTVSS

SEQ ID NO: 510 - DNA, 357 bp, Artificial sequence
  BIIB-12-1309 VH Nucleic Acid Sequence
caggtgcagctggtggagtctgggggaggcgtggtccagcctgggaggtccctgagactctcctgtgcagcgtctggattcaccttcagtagctatggcatgcactgggtccgccaggctccaggcaaggggctggagtgggtggcagttatatcgtatgatggaagtaataaatactatgcagactccgtgaagggccgattcaccatctccagagacaattccaagaacacgctgtatctgcaaatgaacagcctgagagccgaggacacggcggtgtactactgcgccagaggcagatacacaagcagatacttccaacactggggacagggtacattggtcaccgtctcctca

SEQ ID NO: 511 - protein, 122 aa, Artificial sequence
  BIIB-12-1310 VH Amino Acid Sequence
EVQLVESGGGLVKPGGSLRLSCAASGFTFSSYSMNWVRQAPGKGLEWVSSISSSSSYIYYADSVKGRFTISRDNAKNSLYLQMNSLRAEDTAVYYCARLGGYGSSQRYFDLWGRGTLVTVSS

SEQ ID NO: 512 - DNA, 366 bp, Artificial sequence
  BIIB-12-1310 VH Nucleic Acid Sequence
gaggtgcagctggtggagtctgggggaggcctggtcaagcctggggggtccctgagactctcctgtgcagcctctggattcaccttcagtagctatagcatgaactgggtccgccaggctccagggaaggggctggagtgggtctcatccattagtagtagtagtagttacatatactacgcagactcagtgaagggccgattcaccatctccagagacaacgccaagaactcactgtatctgcaaatgaacagcctgagagccgaggacacggcggtgtactactgcgccagattgggcggatacggaagctcgcagcgatacttcgacctatgggggagaggtaccttggtcaccgtctcctca

SEQ ID NO: 513 - protein, 116 aa, Artificial sequence
  BIIB-12-1311 VH Amino Acid Sequence
QVQLVESGGGVVQPGRSLRLSCAASGFTFSSYGMHWVRQAPGKGLEWVAVISYDGSNKYYADSVKGRFTISRDNSKNTLYLQMNSLRAEDTAVYYCAKGRHYWAVWGQGTLVTVSS

SEQ ID NO: 514 - DNA, 348 bp, Artificial sequence
  BIIB-12-1311 VH Nucleic Acid Sequence
caggtgcagctggtggagtctgggggaggcgtggtccagcctgggaggtccctgagactctcctgtgcagcgtctggattcaccttcagtagctatggcatgcactgggtccgccaggctccaggcaaggggctggagtgggtggcagttatatcgtatgatggaagtaataaatactatgcagactccgtgaagggccgattcaccatctccagagacaattccaagaacacgctgtatctgcaaatgaacagcctgagagccgaggacacggcggtgtactactgcgccaagggcagacactactgggccgtctggggacagggtacattggtcaccgtctcctca

SEQ ID NO: 515 - protein, 117 aa, Artificial sequence
  BIIB-12-1312 VH Amino Acid Sequence
QVQLVESGGGVVQPGRSLRLSCAASGFTFSSYGMHWVRQAPGKGLEWVAVISYDGSNKYYADSVKGRFTISRDNSKNTLYLQMNSLRAEDTAVYYCAKGMGHWIDYWGQGTLVTVSS

SEQ ID NO: 516 - DNA, 351 bp, Artificial sequence
  BIIB-12-1312 VH Nucleic Acid Sequence
caggtgcagctggtggagtctgggggaggcgtggtccagcctgggaggtccctgagactctcctgtgcagcgtctggattcaccttcagtagctatggcatgcactgggtccgccaggctccaggcaaggggctggagtgggtggcagttatatcgtatgatggaagtaataaatactatgcagactccgtgaagggccgattcaccatctccagagacaattccaagaacacgctgtatctgcaaatgaacagcctgagagccgaggacacggcggtgtactactgcgccaagggaatgggacactggattgactactggggacagggtacattggtcaccgtctcctca

SEQ ID NO: 517 - protein, 116 aa, Artificial sequence
  BIIB-12-1313 VH Amino Acid Sequence
QVQLVESGGGVVQPGRSLRLSCAASGFTFSSYGMHWVRQAPGKGLEWVAVISYDGSNKYYADSVKGRFTISRDNSKNTLYLQMNSLRAEDTAVYYCAKGTGWWRYWGQGTLVTVSS

SEQ ID NO: 518 - DNA, 348 bp, Artificial sequence
  BIIB-12-1313 VH Nucleic Acid Sequence
caggtgcagctggtggagtctgggggaggcgtggtccagcctgggaggtccctgagactctcctgtgcagcgtctggattcaccttcagtagctatggcatgcactgggtccgccaggctccaggcaaggggctggagtgggtggcagttatatcgtatgatggaagtaataaatactatgcagactccgtgaagggccgattcaccatctccagagacaattccaagaacacgctgtatctgcaaatgaacagcctgagagccgaggacacggcggtgtactactgcgccaagggaaccggctggtggcgatactggggacagggtacattggtcaccgtctcctca

SEQ ID NO: 519 - protein, 116 aa, Artificial sequence
  BIIB-12-1314 VH Amino Acid Sequence
QVQLVESGGGVVQPGRSLRLSCAASGFTFSSYGMHWVRQAPGKGLEWVAVISYDGSNKYYADSVKGRFTISRDNSKNTLYLQMNSLRAEDTAVYYCAKGTRWAGNWGQGTLVTVSS

SEQ ID NO: 520 - DNA, 348 bp, Artificial sequence
  BIIB-12-1314 VH Nucleic Acid Sequence
caggtgcagctggtggagtctgggggaggcgtggtccagcctgggaggtccctgagactctcctgtgcagcgtctggattcaccttcagtagctatggcatgcactgggtccgccaggctccaggcaaggggctggagtgggtggcagttatatcgtatgatggaagtaataaatactatgcagactccgtgaagggccgattcaccatctccagagacaattccaagaacacgctgtatctgcaaatgaacagcctgagagccgaggacacggcggtgtactactgcgccaagggaactagatgggcagggaattggggacagggtacattggtcaccgtctcctca

SEQ ID NO: 521 - protein, 122 aa, Artificial sequence
  BIIB-12-1315 VH Amino Acid Sequence
QVQLVQSGAEVKKPGASVKVSCKASGYTFTSYYMVWVRQAPGQGLEWMGIINPSGGSTSYAQKFQGRVTMTRDTSTSTVYMELSSLRSEDTAVYYCARGRPSSKRVTYFDYWGQGTLVTVSS

SEQ ID NO: 522 - DNA, 366 bp, Artificial sequence
  BIIB-12-1315 VH Nucleic Acid Sequence
caggtgcagctggtgcagtctggggctgaggtgaagaagcctggggcctcagtgaaggtttcctgcaaggcatctggatacaccttcaccagctactatatggtctgggtgcgacaggcccctggacaagggcttgagtggatgggaataatcaaccctagtggtggtagcacaagctacgcacagaagttccagggcagagtcaccatgaccagggacacgtccacgagcacagtctacatggagctgagcagcctgagatctgaggacacggcggtgtactactgcgccagaggaaggcctagcagcaaaagggttacatacttcgactactggggacagggtacattggtcaccgtctcctca

SEQ ID NO: 523 - protein, 118 aa, Artificial sequence
  BIIB-12-1316 VH Amino Acid Sequence
QVQLVESGGGVVQPGRSLRLSCAASGFTFSSYGMHWVRQAPGKGLEWVAVISYDGSNKYYADSVKGRFTISRDNSKNTLYLQMNSLRAEDTAVYYCAKSGQYRAFDIWGQGTMVTVSS

SEQ ID NO: 524 - DNA, 354 bp, Artificial sequence
  BIIB-12-1316 VH Nucleic Acid Sequence
caggtgcagctggtggagtctgggggaggcgtggtccagcctgggaggtccctgagactctcctgtgcagcgtctggattcaccttcagtagctatggcatgcactgggtccgccaggctccaggcaaggggctggagtgggtggcagttatatcgtatgatggaagtaataaatactatgcagactccgtgaagggccgattcaccatctccagagacaattccaagaacacgctgtatctgcaaatgaacagcctgagagccgaggacacggcggtgtactactgcgccaagtctggacagtatagagcctttgatatttggggtcagggtacaatggtcaccgtctcctca

SEQ ID NO: 525 - protein, 117 aa, Artificial sequence
  BIIB-12-1317 VH Amino Acid Sequence
QVQLVESGGGVVQPGRSLRLSCAASGFTFSSYGMHWVRQAPGKGLEWVAVISYDGSNKYYADSVKGRFTISRDNSKNTLYLQMNSLRAEDTAVYYCARGVGGHDTRWGQGTLVTVSS

SEQ ID NO: 526 - DNA, 351 bp, Artificial sequence
  BIIB-12-1317 VH Nucleic Acid Sequence
caggtgcagctggtggagtctgggggaggcgtggtccagcctgggaggtccctgagactctcctgtgcagcgtctggattcaccttcagtagctatggcatgcactgggtccgccaggctccaggcaaggggctggagtgggtggcagttatatcgtatgatggaagtaataaatactatgcagactccgtgaagggccgattcaccatctccagagacaattccaagaacacgctgtatctgcaaatgaacagcctgagagccgaggacacggcggtgtactactgcgccagaggcgtaggaggacacgacacgagatggggacagggtacattggtcaccgtctcctca

SEQ ID NO: 527 - protein, 125 aa, Artificial sequence
  BIIB-12-1318 VH Amino Acid Sequence
QVQLVESGGGVVQPGRSLRLSCAASGFTFSSYGMHWVRQAPGKGLEWVAVISYDGSNKYYADSVKGRFTISRDNSKNTLYLQMNSLRAEDTAVYYCARKGDYRSGSYSGRAFGIWGQGTMVTVSS

SEQ ID NO: 528 - DNA, 375 bp, Artificial sequence
  BIIB-12-1318 VH Nucleic Acid Sequence
caggtgcagctggtggagtctgggggaggcgtggtccagcctgggaggtccctgagactctcctgtgcagcgtctggattcaccttcagtagctatggcatgcactgggtccgccaggctccaggcaaggggctggagtgggtggcagttatatcgtatgatggaagtaataaatactatgcagactccgtgaagggccgattcaccatctccagagacaattccaagaacacgctgtatctgcaaatgaacagcctgagagccgaggacacggcggtgtactactgcgccagaaagggagactacaggagcggaagctactccggaagagccttcggtatatggggtcagggtacaatggtcaccgtctcctca

SEQ ID NO: 529 - protein, 118 aa, Artificial sequence
  BIIB-12-1319 VH Amino Acid Sequence
QVQLVESGGGVVQPGRSLRLSCAASGFTFSSYGMHWVRQAPGKGLEWVAVISYDGSNKYYADSVKGRFTISRDNSKNTLYLQMNSLRAEDTAVYYCARTGYHRSVYYWGQGTLVTVSS

SEQ ID NO: 530 - DNA, 354 bp, Artificial sequence
  BIIB-12-1319 VH Nucleic Acid Sequence
caggtgcagctggtggagtctgggggaggcgtggtccagcctgggaggtccctgagactctcctgtgcagcgtctggattcaccttcagtagctatggcatgcactgggtccgccaggctccaggcaaggggctggagtgggtggcagttatatcgtatgatggaagtaataaatactatgcagactccgtgaagggccgattcaccatctccagagacaattccaagaacacgctgtatctgcaaatgaacagcctgagagccgaggacacggcggtgtactactgcgccagaactggataccacagaagtgtatactattggggacagggtacattggtcaccgtctcctca

SEQ ID NO: 531 - protein, 122 aa, Artificial sequence
  BIIB-12-1322 VH Amino Acid Sequence
QVQLVQSGAEVKKPGASVKVSCKASGYTFTSYYIHWVRQAPGQGLEWMGIINPSGGSTSYAQKFQGRVTMTRDTSTSTVYMELSSLRSEDTAVYYCARSRQRHRGDWYFDLWGRGTLVTVSS

SEQ ID NO: 532 - DNA, 366 bp, Artificial sequence
  BIIB-12-1322 VH Nucleic Acid Sequence
caggtgcagctggtgcagtctggggctgaggtgaagaagcctggggcctcagtgaaggtttcctgcaaggcatctggatacaccttcaccagctactatatccactgggtgcgacaggcccctggacaagggcttgagtggatgggaataatcaaccctagtggtggtagcacaagctacgcacagaagttccagggcagagtcaccatgaccagggacacgtccacgagcacagtctacatggagctgagcagcctgagatctgaggacacggcggtgtactactgcgctagatcaagacaaagacacagaggtgattggtacttcgatttatgggggagaggtaccttggtcaccgtctcctca

SEQ ID NO: 533 - protein, 119 aa, Artificial sequence
  BIIB-12-1323 VH Amino Acid Sequence
QVQLVQSGAEVKKPGASVKVSCKASGYTFTSYYIHWVRQAPGQGLEWMGIINPSGGSTSYAQKFQGRVTMTRDTSTSTVYMELSSLRSEDTAVYYCARGRRFPRGLDYWGQGTLVTVSS

SEQ ID NO: 534 - DNA, 357 bp, Artificial sequence
  BIIB-12-1323 VH Nucleic Acid Sequence
caggtgcagctggtgcagtctggggctgaggtgaagaagcctggggcctcagtgaaggtttcctgcaaggcatctggatacaccttcaccagctactatatccactgggtgcgacaggcccctggacaagggcttgagtggatgggaataatcaaccctagtggtggtagcacaagctacgcacagaagttccagggcagagtcaccatgaccagggacacgtccacgagcacagtctacatggagctgagcagcctgagatctgaggacacggcggtgtactactgcgccagaggcagaagattccctagaggcttagattactggggacagggtacattggtcaccgtctcctca

SEQ ID NO: 535 - protein, 120 aa, Artificial sequence
  BIIB-12-1324 VH Amino Acid Sequence
QVQLVQSGAEVKKPGASVKVSCKASGYTFTSYYMVWVRQAPGQGLEWMGIINPSGGSTSYAQKFQGRVTMTRDTSTSTVYMELSSLRSEDTAVYYCARLPRYSKRGLDVWGQGTMVTVSS

SEQ ID NO: 536 - DNA, 360 bp, Artificial sequence
  BIIB-12-1324 VH Nucleic Acid Sequence
caggtgcagctggtgcagtctggggctgaggtgaagaagcctggggcctcagtgaaggtttcctgcaaggcatctggatacaccttcaccagctactatatggtctgggtgcgacaggcccctggacaagggcttgagtggatgggaataatcaaccctagtggtggtagcacaagctacgcacagaagttccagggcagagtcaccatgaccagggacacgtccacgagcacagtctacatggagctgagcagcctgagatctgaggacacggcggtgtactactgcgccagacttcctagatacagcaaaagaggtctagacgtatggggtcagggtacaatggtcaccgtctcctca

SEQ ID NO: 537 - protein, 117 aa, Artificial sequence
  BIIB-12-1325 VH Amino Acid Sequence
QVQLVQSGAEVKKPGASVKVSCKASGYTFTSYYMVWVRQAPGQGLEWMGIINPSGGSTSYAQKFQGRVTMTRDTSTSTVYMELSSLRSEDTAVYYCARGGRYMLDPWGQGTLVTVSS

SEQ ID NO: 538 - DNA, 351 bp, Artificial sequence
  BIIB-12-1325 VH Nucleic Acid Sequence
caggtgcagctggtgcagtctggggctgaggtgaagaagcctggggcctcagtgaaggtttcctgcaaggcatctggatacaccttcaccagctactatatggtctgggtgcgacaggcccctggacaagggcttgagtggatgggaataatcaaccctagtggtggtagcacaagctacgcacagaagttccagggcagagtcaccatgaccagggacacgtccacgagcacagtctacatggagctgagcagcctgagatctgaggacacggcggtgtactactgcgccagaggaggtagatatatgttagacccatggggacagggtacattggtcaccgtctcctca

SEQ ID NO: 539 - protein, 122 aa, Artificial sequence
  BIIB-12-1326 VH Amino Acid Sequence
EVQLLESGGGLVQPGGSLRLSCAASGFTFSSYAMSWVRQAPGKGLEWVSTISGSGGSTYYADSVKGRFTISRDNSKNTLYLQMNSLRAEDTAVYYCAKGPLYRRYGYGMDVWGQGTTVTVSS

SEQ ID NO: 540 - DNA, 366 bp, Artificial sequence
  BIIB-12-1326 VH Nucleic Acid Sequence
gaggtgcagctgttggagtctgggggaggcttggtacagcctggggggtccctgagactctcctgtgcagcctctggattcacctttagcagctatgccatgagctgggtccgccaggctccagggaaggggctggagtgggtctcaaccattagtggtagtggtggtagcacatactacgcagactccgtgaagggccggttcaccatctccagagacaattccaagaacacgctgtatctgcaaatgaacagcctgagagccgaggacacggcggtgtactactgcgccaaggggccgttgtaccgcagatacggctacggtatggacgtttggggccagggaacaactgtcaccgtctcctca

SEQ ID NO: 541 - protein, 122 aa, Artificial sequence
  BIIB-12-1327 VH Amino Acid Sequence
QVQLVESGGGVVQPGRSLRLSCAASGFTFSSYGMHWVRQAPGKGLEWVAVISYDGSNKYYADSVKGRFTISRDNSKNTLYLQMNSLRAEDTAVYYCAKLGLARGGGYGMDVWGQGTTVTVSS

SEQ ID NO: 542 - DNA, 366 bp, Artificial sequence
  BIIB-12-1327 VH Nucleic Acid Sequence
caggtgcagctggtggagtctgggggaggcgtggtccagcctgggaggtccctgagactctcctgtgcagcgtctggattcaccttcagtagctatggcatgcactgggtccgccaggctccaggcaaggggctggagtgggtggcagttatatcgtatgatggaagtaataaatactatgcagactccgtgaagggccgattcaccatctccagagacaattccaagaacacgctgtatctgcaaatgaacagcctgagagccgaggacacggcggtgtactactgcgccaagttaggattggcaagaggaggtggatacggaatggacgtatggggccagggaacaactgtcaccgtctcctca

SEQ ID NO: 543 - protein, 127 aa, Artificial sequence
  BIIB-12-1328 VH Amino Acid Sequence
QLQLQESGPGLVKPSETLSLTCTVSGGSISSSSYYWGWIRQPPGKGLEWIGSIYYSGSTYYNPSLKSRVTISVDTSKNQFSLKLSSVTAADTAVYYCARDPAYYSGHDYYYYGMDVWGQGTTVTVSS

SEQ ID NO: 544 - DNA, 381 bp, Artificial sequence
  BIIB-12-1328 VH Nucleic Acid Sequence
cagctgcagctgcaggagtcgggcccaggactggtgaagccttcggagaccctgtccctcacctgcactgtctctggtggctccatcagcagtagtagttactactggggctggatccgccagcccccagggaaggggctggagtggattgggagtatctattatagtgggagcacctactacaacccgtccctcaagagtcgagtcaccatatccgtagacacgtccaagaaccagttctccctgaagctgagttctgtgaccgccgcagacacggcggtgtactactgcgccagagatcccgcttactactcaggtcacgactattactattatggaatggatgtatggggccagggaacaactgtcaccgtctcctca

SEQ ID NO: 545 - protein, 119 aa, Artificial sequence
  BIIB-12-1329 VH Amino Acid Sequence
QVQLVESGGGVVQPGRSLRLSCAASGFTFSSYGMHWVRQAPGKGLEWVAVISYDGSNKYYADSVKGRFTISRDNSKNTLYLQMNSLRAEDTAVYYCARGGAGSRYFQHWGQGTLVTVSS

SEQ ID NO: 546 - DNA, 357 bp, Artificial sequence
  BIIB-12-1329 VH Nucleic Acid Sequence
caggtgcagctggtggagtctgggggaggcgtggtccagcctgggaggtccctgagactctcctgtgcagcgtctggattcaccttcagtagctatggcatgcactgggtccgccaggctccaggcaaggggctggagtgggtggcagttatatcgtatgatggaagtaataaatactatgcagactccgtgaagggccgattcaccatctccagagacaattccaagaacacgctgtatctgcaaatgaacagcctgagagccgaggacacggcggtgtactactgcgccagaggaggtgctggatcaaggtacttccaacactggggacagggtacattggtcaccgtctcctca

SEQ ID NO: 547 - protein, 118 aa, Artificial sequence
  BIIB-12-1330 VH Amino Acid Sequence
QVQLVESGGGVVQPGRSLRLSCAASGFTFSSYGMHWVRQAPGKGLEWVAVISYDGSNKYYADSVKGRFTISRDNSKNTLYLQMNSLRAEDTAVYYCAKGGSARWINIWGQGTTVTVSS

SEQ ID NO: 548 - DNA, 354 bp, Artificial sequence
  BIIB-12-1330 VH Nucleic Acid Sequence
caggtgcagctggtggagtctgggggaggcgtggtccagcctgggaggtccctgagactctcctgtgcagcgtctggattcaccttcagtagctatggcatgcactgggtccgccaggctccaggcaaggggctggagtgggtggcagttatatcgtatgatggaagtaataaatactatgcagactccgtgaagggccgattcaccatctccagagacaattccaagaacacgctgtatctgcaaatgaacagcctgagagccgaggacacggcggtgtactactgcgccaagggaggttctgcaagatggatcaacatatggggtcagggaacaactgtcaccgtctcctca

SEQ ID NO: 549 - protein, 118 aa, Artificial sequence
  BIIB-12-1331 VH Amino Acid Sequence
QVQLVESGGGVVQPGRSLRLSCAASGFTFSSYGMHWVRQAPGKGLEWVAVISYDGSNKYYADSVKGRFTISRDNSKNTLYLQMNSLRAEDTAVYYCAKVPHHRGHDYWGQGTLVTVSS

SEQ ID NO: 550 - DNA, 354 bp, Artificial sequence
  BIIB-12-1331 VH Nucleic Acid Sequence
caggtgcagctggtggagtctgggggaggcgtggtccagcctgggaggtccctgagactctcctgtgcagcgtctggattcaccttcagtagctatggcatgcactgggtccgccaggctccaggcaaggggctggagtgggtggcagttatatcgtatgatggaagtaataaatactatgcagactccgtgaagggccgattcaccatctccagagacaattccaagaacacgctgtatctgcaaatgaacagcctgagagccgaggacacggcggtgtactactgcgccaaggtacctcaccacagaggtcacgattactggggacagggtacattggtcaccgtctcctca

SEQ ID NO: 551 - protein, 119 aa, Artificial sequence
  BIIB-12-1332 VH Amino Acid Sequence
QVQLVQSGAEVKKPGASVKVSCKASGYTFTSYYMSWVRQAPGQGLEWMGIINPSGGSTSYAQKFQGRVTMTRDTSTSTVYMELSSLRSEDTAVYYCARLGRKSRVFDIWGQGTMVTVSS

SEQ ID NO: 552 - DNA, 357 bp, Artificial sequence
  BIIB-12-1332 VH Nucleic Acid Sequence
caggtgcagctggtgcagtctggggctgaggtgaagaagcctggggcctcagtgaaggtttcctgcaaggcatctggatacaccttcaccagctactatatgtcatgggtgcgacaggcccctggacaagggcttgagtggatgggaataatcaaccctagtggtggtagcacaagctacgcacagaagttccagggcagagtcaccatgaccagggacacgtccacgagcacagtctacatggagctgagcagcctgagatctgaggacacggcggtgtactactgcgccagattgggaaggaaatcaagggtattcgacatatggggtcagggtacaatggtcaccgtctcctca

SEQ ID NO: 553 - protein, 121 aa, Artificial sequence
  BIIB-12-1333 VH Amino Acid Sequence
QVQLVQSGAEVKKPGASVKVSCKASGYTFTSYYMVWVRQAPGQGLEWMGIINPSGGSTSYAQKFQGRVTMTRDTSTSTVYMELSSLRSEDTAVYYCARVSRRDYPLAFDIWGQGTMVTVSS

SEQ ID NO: 554 - DNA, 363 bp, Artificial sequence
  BIIB-12-1333 VH Nucleic Acid Sequence
caggtgcagctggtgcagtctggggctgaggtgaagaagcctggggcctcagtgaaggtttcctgcaaggcatctggatacaccttcaccagctactatatggtctgggtgcgacaggcccctggacaagggcttgagtggatgggaataatcaaccctagtggtggtagcacaagctacgcacagaagttccagggcagagtcaccatgaccagggacacgtccacgagcacagtctacatggagctgagcagcctgagatctgaggacacggcggtgtactactgcgctagagtatctagaagggactacccattagccttcgatatctggggtcagggtacaatggtcaccgtctcctca

SEQ ID NO: 555 - protein, 120 aa, Artificial sequence
  BIIB-12-1334 VH Amino Acid Sequence
QVQLVESGGGVVQPGRSLRLSCAASGFTFSSYGMHWVRQAPGKGLEWVAVISYDGSNKYYADSVKGRFTISRDNSKNTLYLQMNSLRAEDTAVYYCARVPRKQTGHVDYWGQGTLVTVSS

SEQ ID NO: 556 - DNA, 360 bp, Artificial sequence
  BIIB-12-1334 VH Nucleic Acid Sequence
caggtgcagctggtggagtctgggggaggcgtggtccagcctgggaggtccctgagactctcctgtgcagcgtctggattcaccttcagtagctatggcatgcactgggtccgccaggctccaggcaaggggctggagtgggtggcagttatatcgtatgatggaagtaataaatactatgcagactccgtgaagggccgattcaccatctccagagacaattccaagaacacgctgtatctgcaaatgaacagcctgagagccgaggacacggcggtgtactactgcgccagagtccctagaaagcaaactggtcacgtggactactggggacagggtacattggtcaccgtctcctca

SEQ ID NO: 557 - protein, 122 aa, Artificial sequence
  BIIB-12-894 VH Amino Acid Sequence
QLQLQESGPGLVKPSETLSLTCTVSGGSISSSSYYWGWIRQPPGKGLEWIGSIYYSGSTYYNPSLKSRVTISVDTSKNQFSLKLSSVTAADTAVYYCAREGAHSSMAGLDVWGQGTMVTVSS

SEQ ID NO: 558 - DNA, 366 bp, Artificial sequence
  BIIB-12-894 VH Nucleic Acid Sequence
cagctgcagctgcaggagtcgggcccaggactggtgaagccttcggagaccctgtccctcacctgcactgtctctggtggctccatcagcagtagtagttactactggggctggatccgccagcccccagggaaggggctggagtggattgggagtatctattatagtgggagcacctactacaacccgtccctcaagagtcgagtcaccatatccgtagacacgtccaagaaccagttctccctgaagctgagttctgtgaccgccgcagacacggcggtgtactactgcgccagagaaggagctcacagcagcatggcagggctagacgtatggggtcagggtacaatggtcaccgtctcctca

SEQ ID NO: 559 - protein, 122 aa, Artificial sequence
  BIIB-12-925 VH Amino Acid Sequence
EVQLLESGGGLVQPGGSLRLSCAASGFTFSSYAMSWVRQAPGKGLEWVSAISGSGGSTYYADSVKGRFTISRDNSKNTLYLQMNSLRAEDTAVYYCAKGPRYYWYSWYFDLWGRGTLVTVSS

SEQ ID NO: 560 - DNA, 366 bp, Artificial sequence
  BIIB-12-925 VH Nucleic Acid Sequence
gaggtgcagctgttggagtctgggggaggcttggtacagcctggggggtccctgagactctcctgtgcagcctctggattcacctttagcagctatgccatgagctgggtccgccaggctccagggaaggggctggagtgggtctcagctattagtggtagtggtggtagcacatactacgcagactccgtgaagggccggttcaccatctccagagacaattccaagaacacgctgtatctgcaaatgaacagcctgagagccgaggacacggcggtgtactactgcgccaagggccccagatactactggtacagctggtacttcgacctatgggggagaggtaccttggtcaccgtctcctca

SEQ ID NO: 561 - protein, 125 aa, Artificial sequence
  BIIB-12-1320 VH Amino Acid Sequence
QLQLQESGPGLVKPSETLSLTCTVSGGSISSSSYYWGWIRQPPGKGLEWIGSIYYSGSTYYNPSLKSRVTISVDTSKNQFSLKLSSVTAADTAVYYCARGSGLLVREHYYYYMDVWGKGTTVTVS

SEQ ID NO: 562 - DNA, 378 bp, Artificial sequence
  BIIB-12-1320 VH Nucleic Acid Sequence
cagctgcagctgcaggagtcgggcccaggactggtgaagccttcggagaccctgtccctcacctgcactgtctctggtggctccatcagcagtagtagttactactggggctggatccgccagcccccagggaaggggctggagtggattgggagtatctattatagtgggagcacctactacaacccgtccctcaagagtcgagtcaccatatccgtagacacgtccaagaaccagttctccctgaagctgagttctgtgaccgccgcagacacggcggtgtactactgcgccagaggctctggattgctagtccgagagcactactactactacatggacgtatggggcaagggtacaactgtcaccgtctcctca

SEQ ID NO: 563 - protein, 118 aa, Artificial sequence
  BIIB-12-1321 VH Amino Acid Sequence
QVQLVQSGAEVKKPGSSVKVSCKASGGTFSSYAISWVRQAPGQGLEWMGGIIPIFGTANYAQKFQGRVTITADESTSTAYMELSSLRSEDTAVYYCARTPDTSSATDWGQGTLVTVSS

SEQ ID NO: 564 - DNA, 354 bp, Artificial sequence
  BIIB-12-1321 VH Nucleic Acid Sequence
caggtgcagctggtgcagtctggggctgaggtgaagaagcctgggtcctcggtgaaggtctcctgcaaggcttctggaggcaccttcagcagctatgctatcagctgggtgcgacaggcccctggacaagggcttgagtggatgggagggatcatccctatctttggtacagcaaactacgcacagaagttccagggcagagtcacgattaccgcggacgaatccacgagcacagcctacatggagctgagcagcctgagatctgaggacacggcggtgtactactgcgccagaactcctgacacaagctctgctaccgattggggacagggtacattggtcaccgtctcctca

SEQ ID NO: 565 - protein, 113 aa, Artificial sequence
  BIIB-12-891 VL Amino Acid Sequence
DIVMTQSPDSLAVSLGERATINCKSSQSVLYSSNNKNYLAWYQQKPGQPPKLLIYWASTRESGVPDRFSGSGSGTDFTLTISSLQAEDVAVYYCQQYFNPPFTFGGGTKVEIK

SEQ ID NO: 566 - DNA, 339 bp, Artificial sequence
  BIIB-12-891 VL Nucleic Acid Sequence
gacatcgtgatgacccagtctccagactccctggctgtgtctctgggcgagagggccaccatcaactgcaagtccagccagagtgttttatacagctccaacaataagaactacttagcttggtaccagcagaaaccaggacagcctcctaagctgctcatttactgggcatctacccgggaatccggggtccctgaccgattcagtggcagcgggtctgggacagatttcactctcaccatcagcagcctgcaggctgaagatgtggcagtttattactgtcagcagtacttcaacccccctttcacttttggcggagggaccaaggttgagatcaaa

SEQ ID NO: 567 - protein, 107 aa, Artificial sequence
  BIIB-12-892 VL Amino Acid Sequence
EIVLTQSPATLSLSPGERATLSCRASQSVSSYLAWYQQKPGQAPRLLIYDASNRATGIPARFSGSGSGTDFTLTISSLEPEDFAVYYCQQRLNLPLTFGGGTKVEIK

SEQ ID NO: 568 - DNA, 321 bp, Artificial sequence
  BIIB-12-892 VL Nucleic Acid Sequence
gaaattgtgttgacacagtctccagccaccctgtctttgtctccaggggaaagagccaccctctcctgcagggccagtcagagtgttagcagctacttagcctggtaccaacagaaacctggccaggctcccaggctcctcatttatgatgcatccaacagggccactggcatcccagccaggttcagtggcagtgggtctgggacagatttcactctcaccatcagcagcctagagcctgaagattttgcagtttattactgtcagcagagactcaacctccctctcacttttggcggagggaccaaggttgagatcaaa

SEQ ID NO: 569 - protein, 107 aa, Artificial sequence
  BIIB-12-893 VL Amino Acid Sequence
DIQLTQSPSSVSASVGDRVTITCRASQGISSWLAWYQQKPGKAPKLLIYAASSLQSGVPSRFSGSGSGTDFTLTISSLQPEDFATYYCQQAAAFPFTFGGGTKVEIK

SEQ ID NO: 570 - DNA, 321 bp, Artificial sequence
  BIIB-12-893 VL Nucleic Acid Sequence
gacatccagttgacccagtctccatcttccgtgtctgcatctgtaggagacagagtcaccatcacttgtcgggcgagtcagggtattagcagctggttagcctggtatcagcagaaaccagggaaagcccctaagctcctgatctatgctgcatccagtttgcaaagtggggtcccatcaaggttcagcggcagtggatctgggacagatttcactctcaccatcagcagcctgcagcctgaagattttgcaacttattactgtcagcaggcagccgccttccctttcacttttggcggagggaccaaggttgagatcaaa

SEQ ID NO: 571 - protein, 106 aa, Artificial sequence
  BIIB-12-895 VL Amino Acid Sequence
DIQMTQSPSSVSASVGDRVTITCRASQGISSWLAWYQQKPGKAPKLLIYAASSLQSGVPSRFSGSGSGTDFTLTISSLQPEDFATYYCQQASSFPFTFGGGTKVEI

SEQ ID NO: 572 - DNA, 321 bp, Artificial sequence; identical to SEQ ID NO: 306
  BIIB-12-895 VL Nucleic Acid Sequence

SEQ ID NO: 573 - protein, 107 aa, Artificial sequence; identical to SEQ ID NO: 341
  BIIB-12-896 VL Amino Acid Sequence

SEQ ID NO: 574 - DNA, 321 bp, Artificial sequence; identical to SEQ ID NO: 342
  BIIB-12-896 VL Nucleic Acid Sequence

SEQ ID NO: 575 - protein, 108 aa, Artificial sequence
  BIIB-12-897 VL Amino Acid Sequence
EIVLTQSPGTLSLSPGERATLSCRASQSVSSSYLAWYQQKPGQAPRLLIYGASSRATGIPDRFSGSGSGTDFTLTISRLEPEDFAVYYCQQDGNYPYTFGGGTKVEIK

SEQ ID NO: 576 - DNA, 324 bp, Artificial sequence
  BIIB-12-897 VL Nucleic Acid Sequence
gaaattgtgttgacgcagtctccaggcaccctgtctttgtctccaggggaaagagccaccctctcctgcagggccagtcagagtgttagcagcagctacttagcctggtaccagcagaaacctggccaggctcccaggctcctcatctatggtgcatccagcagggccactggcatcccagacaggttcagtggcagtgggtctgggacagacttcactctcaccatcagcagactggagcctgaagattttgcagtgtattactgtcagcaggacggaaactacccttacacttttggcggagggaccaaggttgagatcaaa

SEQ ID NO: 577 - protein, 107 aa, Artificial sequence
  BIIB-12-898 VL Amino Acid Sequence
DIQLTQSPSTLSASVGDRVTITCRASQAISSWLAWYQQKPGKAPKLLIYDASSLESGVPSRFSGSGSGTEFTLTISSLQPDDFATYYCQQVNRFPFTFGGGTKVEIK

SEQ ID NO: 578 - DNA, 321 bp, Artificial sequence
  BIIB-12-898 VL Nucleic Acid Sequence
gacatccagttgacccagtctccttccaccctgtctgcatctgtaggagacagagtcaccatcacttgccgggccagtcaggctattagtagctggttggcctggtatcagcagaaaccagggaaagcccctaagctcctgatctatgatgcctccagtttggaaagtggggtcccatcaaggttcagcggcagtggatctgggacagaattcactctcaccatcagcagcctgcagcctgatgattttgcaacttattactgccagcaggtcaatcgcttccctttcacttttggcggagggaccaaggttgagatcaaa

SEQ ID NO: 579 - protein, 113 aa, Artificial sequence
  BIIB-12-899 VL Amino Acid Sequence
DIVMTQSPDSLAVSLGERATINCKSSQSVLYSSNNKNYLAWYQQKPGQPPKLLIYWASTRESGVPDRFSGSGSGTDFTLTISSLQAEDVAVYYCQQSYTLPPTFGGGTKVEIK

SEQ ID NO: 580 - DNA, 339 bp, Artificial sequence
  BIIB-12-899 VL Nucleic Acid Sequence
gacatcgtgatgacccagtctccagactccctggctgtgtctctgggcgagagggccaccatcaactgcaagtccagccagagtgttttatacagctccaacaataagaactacttagcttggtaccagcagaaaccaggacagcctcctaagctgctcatttactgggcatctacccgggaatccggggtccctgaccgattcagtggcagcgggtctgggacagatttcactctcaccatcagcagcctgcaggctgaagatgtggcagtttattactgtcagcagtcctacaccctccctcctacttttggcggagggaccaaggttgagatcaaa

SEQ ID NO: 581 - protein, 106 aa, Artificial sequence
  BIIB-12-900 VL Amino Acid Sequence
DIQMTQSPSTLSASVGDRVTITCRASQSISSWLAWYQQKPGKAPKLLIYKASSLESGVPSRFSGSGSGTEFTLTISSLQPDDFATYYCQQYRSYPTFGGGTKVEIK

SEQ ID NO: 582 - DNA, 318 bp, Artificial sequence
  BIIB-12-900 VL Nucleic Acid Sequence
gacatccagatgacccagtctccttccaccctgtctgcatctgtaggagacagagtcaccatcacttgccgggccagtcagagtattagtagctggttggcctggtatcagcagaaaccagggaaagcccctaagctcctgatctataaagcctccagtttggaaagtggggtcccatcaaggttcagcggcagtggatctgggacagaattcactctcaccatcagcagcctgcagcctgatgattttgcaacttattactgccagcagtaccgaagctaccctacttttggcggagggaccaaggttgagatcaaa

SEQ ID NO: 583 - protein, 107 aa, Artificial sequence
  BIIB-12-901 VL Amino Acid Sequence
EIVLTQSPATLSLSPGERATLSCRASQSVSSYLAWYQQKPGQAPRLLIYDASNRATGIPARFSGSGSGTDFTLTISSLEPEDFAVYYCQQSANFPFTFGGGTKVEIK

SEQ ID NO: 584 - DNA, 321 bp, Artificial sequence
  BIIB-12-901 VL Nucleic Acid Sequence
gaaattgtgttgacacagtctccagccaccctgtctttgtctccaggggaaagagccaccctctcctgcagggccagtcagagtgttagcagctacttagcctggtaccaacagaaacctggccaggctcccaggctcctcatctatgatgcatccaacagggccactggcatcccagccaggttcagtggcagtgggtctgggacagacttcactctcaccatcagcagcctagagcctgaagattttgcagtttattactgtcagcagtccgccaatttccctttcacttttggcggagggaccaaggttgagatcaaa

SEQ ID NO: 585 - protein, 113 aa, Artificial sequence
  BIIB-12-902 VL Amino Acid Sequence
DIVMTQSPDSLAVSLGERATINCKSSQSVLYSSNNKNYLAWYQQKPGQPPKLLISWASTRESGVPDRFSGSGSGTDFTLTISSLQAEDVAVYYCQQSFSTPFTFGGGTKVEIK

SEQ ID NO: 586 - DNA, 339 bp, Artificial sequence
  BIIB-12-902 VL Nucleic Acid Sequence
gacatcgtgatgacccagtctccagactccctggctgtgtctctgggcgagagggccaccatcaactgcaagtccagccagagtgttttatacagctccaacaataagaactacttagcttggtaccagcagaaaccaggacagcctcctaagctgctcatttcctgggcatctacccgggaatccggggtccctgaccgattcagtggcagcgggtctgggacagatttcactctcaccatcagcagcctgcaggctgaagatgtggcagtttattactgtcagcagtccttctccactcctttcacttttggcggagggaccaaggttgagatcaaa

SEQ ID NO: 587 - protein, 107 aa, Artificial sequence
  BIIB-12-903 VL Amino Acid Sequence
EIVLTQSPATLSLSPGERATLSCRASQSVSSYLAWYQQKPGQAPRLLIYDASNRATGIPARFSGSGSGTDFTLTISSLEPEDFAVYYCQQRANWPPTFGGGTKVEIK

SEQ ID NO: 588 - DNA, 321 bp, Artificial sequence
  BIIB-12-903 VL Nucleic Acid Sequence
gaaattgtgttgacacagtctccagccaccctgtctttgtctccaggggaaagagccaccctctcctgcagggccagtcagagtgttagcagctacttagcctggtaccaacagaaacctggccaggctcccaggctcctcatctatgatgcatccaacagggccactggcatcccagccaggttcagtggcagtgggtctgggacagacttcactctcaccatcagcagcctagagcctgaagattttgcagtttattactgtcagcagagagccaactggcctcctacttttggcggagggaccaaggttgagatcaaa

SEQ ID NO: 589 - protein, 107 aa, Artificial sequence; identical to SEQ ID NO: 311
  BIIB-12-904 VL Amino Acid Sequence

SEQ ID NO: 590 - DNA, 321 bp, Artificial sequence
  BIIB-12-904 VL Nucleic Acid Sequence
gaaatagtgatgacgcagtctccagccaccctgtctgtgtctccaggggaaagagccaccctctcctgcagggccagtcagagtgttagcagcaacttagcctggtaccagcagaaacctggccaggctcccaggctcctcatctatggtgcatccaccagggccactggtatcccagccaggttcagtggcagtgggtctgggacagagttcactctcaccatcagcagcctgcagtctgaagattttgcagtttattactgtcagcaggccttcaactggcctcctacttttggcggagggaccaaggttgagatcaaa

SEQ ID NO: 591 - protein, 108 aa, Artificial sequence
  BIIB-12-905 VL Amino Acid Sequence
EIVLTQSPGTLSLSPGERATLSCRASQSVRSSYLAWYQQKPGQAPRLLIYGASSRATGIPDRFSGSGSGTDFTLTISRLEPEDFAVYYCQQYGRFPPTFGGGTKVEIK

SEQ ID NO: 592 - DNA, 324 bp, Artificial sequence
  BIIB-12-905 VL Nucleic Acid Sequence
gaaattgtgttgacgcagtctccaggcaccctgtctttgtctccaggggaaagagccaccctctcctgcagggccagtcagagtgttaggagcagctacttagcctggtaccagcagaaacctggccaggctcccaggctcctcatctatggtgcatccagcagggccactggcatcccagacaggttcagtggcagtgggtctgggacagacttcactctcaccatcagcagactggagcctgaagattttgcagtgtattactgtcagcagtacggacgcttccctcctacttttggcggagggaccaaggttgagatcaaa

SEQ ID NO: 593 - protein, 107 aa, Artificial sequence
  BIIB-12-906 VL Amino Acid Sequence
EIVLTQSPATLSLSPGERATLSCRASQSVSSYLAWYQQKPGQAPRLLIYDASNRATGIPARFSGSGSGTDFTLTISSLEPEDFAVYYCQQSSDWPPTFGGGTKVEIK

SEQ ID NO: 594 - DNA, 321 bp, Artificial sequence
  BIIB-12-906 VL Nucleic Acid Sequence
gaaattgtgttgacacagtctccagccaccctgtctttgtctccaggggaaagagccaccctctcctgcagggccagtcagagtgttagcagctacttagcctggtaccaacagaaacctggccaggctcccaggctcctcatctatgatgcatccaacagggccactggcatcccagccaggttcagtggcagtgggtctgggacagacttcactctcaccatcagcagcctagagcctgaagattttgcagtttattactgtcagcagtcctccgactggcctcctacttttggcggagggaccaaggttgagatcaaa

SEQ ID NO: 595 - protein, 112 aa, Artificial sequence
  BIIB-12-907 VL Amino Acid Sequence
DIVMTQSPLSLPVTPGEPASISCRSSQSLLYSNGYNYLDWYLQKPGQSPQLLIYLGSNRASGVPDRFSGSGSGTDFTLKISRVEAEDVGVYYCMQRLGLPPTFGGGTKVEIK

SEQ ID NO: 596 - DNA, 336 bp, Artificial sequence
  BIIB-12-907 VL Nucleic Acid Sequence
gatattgtgatgactcagtctccactctccctgcccgtcacccctggagagccggcctccatctcctgcaggtctagtcagagcctcctgtatagtaatggatacaactatttggattggtacctgcagaagccagggcagtctccacagctcctgatctatttgggttctaatcgggcctccggggtccctgacaggttcagtggcagtggatcaggcacagattttacactgaaaatcagcagagtggaggctgaggatgttggggtttattactgcatgcagagactcggcctccctcctacttttggcggagggaccaaggttgagatcaaa

SEQ ID NO: 597 - protein, 107 aa, Artificial sequence
  BIIB-12-908 VL Amino Acid Sequence
DIQLTQSPSSVSASVGDRVTITCRASQGISSWLAWYQQKPGKAPKLLIYGASSLQSGVPSRFSGSGSGTDFTLTISSLQPEDFATYYCQQGSSLPITFGGGTKVEIK

SEQ ID NO: 598 - DNA, 321 bp, Artificial sequence
  BIIB-12-908 VL Nucleic Acid Sequence
gacatccagttgacccagtctccatcttccgtgtctgcatctgtaggagacagagtcaccatcacttgtcgggcgagtcagggtattagcagctggttagcctggtatcagcagaaaccagggaaagcccctaagctcctgatctatggtgcatccagtttgcaaagtggggtcccatcaaggttcagcggcagtggatctgggacagatttcactctcaccatcagcagcctgcagcctgaagattttgcaacttattactgtcagcagggatccagtctccctatcacttttggcggagggaccaaggttgagatcaaa

SEQ ID NO: 599 - protein, 107 aa, Artificial sequence
  BIIB-12-909 VL Amino Acid Sequence
EIVLTQSPATLSLSPGERATLSCRASQSVSSYLAWYQQKPGQAPRLLIYDASNRATGIPARFSGSGSGTDFTLTISSLEPEDFAVYYCQQLSDWPPTFGGGTKVEIK

SEQ ID NO: 600 - DNA, 321 bp, Artificial sequence
  BIIB-12-909 VL Nucleic Acid Sequence
gaaattgtgttgacacagtctccagccaccctgtctttgtctccaggggaaagagccaccctctcctgcagggccagtcagagtgttagcagctacttagcctggtaccaacagaaacctggccaggctcccaggctcctcatctatgatgcatccaacagggccactggcatcccagccaggttcagtggcagtgggtctgggacagacttcactctcaccatcagcagcctagagcctgaagattttgcagtttattactgtcagcagctcagtgactggcctcctacttttggcggagggaccaaggttgagatcaaa

SEQ ID NO: 601 - protein, 107 aa, Artificial sequence
  BIIB-12-910 VL Amino Acid Sequence
DIQMTQSPSSLSASVGDRVTITCRASQSISSYLNWYQQKPGKAPKLLIYAASSLQSGVPSRFSGSGSGTDFTLTISSLQPEDFATYYCQQLSHTPFTFGGGTKVEIK

SEQ ID NO: 602 - DNA, 321 bp, Artificial sequence
  BIIB-12-910 VL Nucleic Acid Sequence
gacatccagatgacccagtctccatcctccctgtctgcatctgtaggagacagagtcaccatcacttgccgggcaagtcagagcattagcagctatttaaattggtatcagcagaaaccagggaaagcccctaagctcctgatctatgctgcatccagtttgcaaagtggggtcccatcaaggttcagtggcagtggatctgggacagatttcactctcaccatcagcagtctgcaacctgaagattttgcaacttactactgtcagcaactatcccacactcctttcacttttggcggagggaccaaggttgagatcaaa

SEQ ID NO: 603 - protein, 107 aa, Artificial sequence
  BIIB-12-911 VL Amino Acid Sequence
EIVLTQSPATLSLSPGERATLSCRASQSVSSYLAWYQQKPGQAPRLLIYDASNRATGIPARFSGSGSGTDFTLTISSLEPEDFAVYYCQQRSNFPITFGGGTKVEIK

SEQ ID NO: 604 - DNA, 321 bp, Artificial sequence
  BIIB-12-911 VL Nucleic Acid Sequence
gaaattgtgttgacacagtctccagccaccctgtctttgtctccaggggaaagagccaccctctcctgcagggccagtcagagtgttagcagctacttagcctggtaccaacagaaacctggccaggctcccaggctcctcatctatgatgcatccaacagggccactggcatcccagccaggttcagtggcagtgggtctgggacagacttcactctcaccatcagcagcctagagcctgaagattttgcagtttattactgtcagcagagaagtaacttccctatcacttttggcggagggaccaaggttgagatcaaa

SEQ ID NO: 605 - protein, 107 aa, Artificial sequence
  BIIB-12-912 VL Amino Acid Sequence
EIVMTQSPATLSVSPGERATLSCRASQSVSSNLAWYQQKPGQAPRLLIYGASTRATGIPARFSGSGSGTEFTLTISSLQSEDFAVYYCQQFHNFPPTFGGGTKVEIK

SEQ ID NO: 606 - DNA, 320 bp, Artificial sequence
  BIIB-12-912 VL Nucleic Acid Sequence
gaaatagtgatgacgcagtctccagccaccctgtctgtgtctccaggggaaagagccaccctctcctgcagggccagtcagagtgttagcagcaacttagcctggtaccagcagaaacctggccaggctcccaggctcctcatctatggtgcatccaccagggccactggtatcccagccaggttcagtggcagtgggtctgggacagagttcactctcaccatcagcagcctgcagtctgaagattttgcagtttattactgtcagcagttccacaatttccctcctacttttggcggagggaccaaggttgagatcaa

SEQ ID NO: 607 - protein, 108 aa, Artificial sequence
  BIIB-12-913 VL Amino Acid Sequence
EIVMTQSPATLSVSPGERATLSCRASQSVSSNLAWYQQKPGQAPRLLIYGASTRATGIPARFSGSGSGTEFTLTISSLQSEDFAVYYCQQYAPYPPLTFGGGTKVEIK

SEQ ID NO: 608 - DNA, 324 bp, Artificial sequence
  BIIB-12-913 VL Nucleic Acid Sequence
gaaatagtgatgacgcagtctccagccaccctgtctgtgtctccaggggaaagagccaccctctcctgcagggccagtcagagtgttagcagcaacttagcctggtaccagcagaaacctggccaggctcccaggctcctcatctatggtgcatccaccagggccactggtatcccagccaggttcagtggcagtgggtctgggacagagttcactctcaccatcagcagcctgcagtctgaagattttgcagtttattactgtcagcagtacgccccctaccctcctctcacttttggcggagggaccaaggttgagatcaaa

SEQ ID NO: 609 - protein, 107 aa, Artificial sequence
  BIB-12-914 VL Amino Acid Sequence
DIQMTQSPSSLSASVGDRVTITCRASQSISSYLNWYQQKPGKAPKLLIYAASSLQSGVPSRFSGSGSGTDFTLTISSLQPEDFATYYCQQGYNTPLTFGGGTKVEIK

SEQ ID NO: 610 - DNA, 321 bp, Artificial sequence
  BIIB-12-914 VL Nucleic Acid Sequence
gacatccagatgacccagtctccatcctccctgtctgcatctgtaggagacagagtcaccatcacttgccgggcaagtcagagcattagcagctatttaaattggtatcagcagaaaccagggaaagcccctaagctcctgatctatgctgcatccagtttgcaaagtggggtcccatcaaggttcagtggcagtggatctgggacagatttcactctcaccatcagcagtctgcaacctgaagattttgcaacttactactgtcagcaaggatacaacactcctctcacttttggcggagggaccaaggttgagatcaaa

SEQ ID NO: 611 - protein, 112 aa, Artificial sequence
  BIIB-12-915 VL Amino Acid Sequence
DIVMTQSPLSLPVTPGEPASISCRSSQSLLHSNGYNYLDWYLQKPGQSPQLLIYLASNRASGVPDRFSGSGSGTDFTLKISRVEAEDVGVYYCMQARQRPWTFGGGTKVEIK

SEQ ID NO: 612 - DNA, 336 bp, Artificial sequence
  BIIB-12-915 VL Nucleic Acid Sequence
gatattgtgatgactcagtctccactctccctgcccgtcacccctggagagccggcctccatctcctgcaggtctagtcagagcctcctgcatagtaatggatacaactatttggattggtacctgcagaagccagggcagtctccacagctcctgatctatttggcttctaatcgggcctccggggtccctgacaggttcagtggcagtggatcaggcacagattttacactgaaaatcagcagagtggaggctgaggatgttggggtttattactgcatgcaggcaagacagcgcccttggacttttggcggagggaccaaggttgagatcaaa

SEQ ID NO: 613 - protein, 107 aa, Artificial sequence
  BIIB-12-916 VL Amino Acid Sequence
DIQMTQSPSSLSASVGDRVTITCRASQSISSYLNWYQQKPGKAPKLLIYAASSLQSGVPSRFSGSGSGTDFTLTISSLQPEDFATYYCQQLAITPFTFGGGTKVEIK

SEQ ID NO: 614 - DNA, 321 bp, Artificial sequence
  BIIB-12-916 VL Nucleic Acid Sequence
gacatccagatgacccagtctccatcctccctgtctgcatctgtaggagacagagtcaccatcacttgccgggcaagtcagagcattagcagctatttaaattggtatcagcagaaaccagggaaagcccctaagctcctgatctatgctgcatccagtttgcaaagtggggtcccatcaaggttcagtggcagtggatctgggacagatttcactctcaccatcagcagtctgcaacctgaagattttgcaacttactactgtcagcaactagccatcactcctttcacttttggcggagggaccaaggttgagatcaaa

SEQ ID NO: 615 - protein, 107 aa, Artificial sequence
  BIIB-12-917 VL Amino Acid Sequence
EIVMTQSPATLSVSPGERATLSCRASQSVSSNLAWYQQKPGQAPRLLIYGASTRATGIPARFSGSGSGTEFTLTISSLQSEDFAVYYCQQLFNHPPTFGGGTKVEIK

SEQ ID NO: 616 - DNA, 321 bp, Artificial sequence
  BIIB-12-917 VL Nucleic Acid Sequence
gaaatagtgatgacgcagtctccagccaccctgtctgtgtctccaggggaaagagccaccctctcctgcagggccagtcagagtgttagcagcaacttagcctggtaccagcagaaacctggccaggctcccaggctcctcatctatggtgcatccaccagggccactggtatcccagccaggttcagtggcagtgggtctgggacagagttcactctcaccatcagcagcctgcagtctgaagattttgcagtttattactgtcagcagctcttcaatcaccctcctacttttggcggagggaccaaggttgagatcaaa

SEQ ID NO: 617 - protein, 107 aa, Artificial sequence
  BIIB-12-918 VL Amino Acid Sequence
DIQMTQSPSSLSASVGDRVTITCRASQSISRYLNWYQQKPGKAPKLLIYAASSLQSGVPSRFSGSGSGTDFTLTISSLQPEDFATYYCQQIFSLPITFGGGTKVEIK

SEQ ID NO: 618 - DNA, 321 bp, Artificial sequence
  BIIB-12-918 VL Nucleic Acid Sequence
gacatccagatgacccagtctccatcctccctgtctgcatctgtaggagacagagtcaccatcacttgccgggcaagtcagagcattagcagatatttaaattggtatcagcagaaaccagggaaagcccctaagctcctgatctatgctgcatccagtttgcaaagtggggtcccatcaaggttcagtggcagtggatctgggacagatttcactctcaccatcagcagtctgcaacctgaagattttgcaacttactactgtcagcaaatattcagtctccctatcacttttggcggagggaccaaggttgagatcaaa

SEQ ID NO: 619 - protein, 106 aa, Artificial sequence
  BIIB-12-919 VL Amino Acid Sequence
DIQMTQSPSTLSASVGDRVTITCRASQSISSWLAWYQQKPGKAPKLLIYKASSLESGVPSRFSGSGSGTEFTLTISSLQPDDFATYYCQQVSSYPTFGGGTKVEIK

SEQ ID NO: 620 - DNA, 318 bp, Artificial sequence
  BIIB-12-919 VL Nucleic Acid Sequence
gacatccagatgacccagtctccttccaccctgtctgcatctgtaggagacagagtcaccatcacttgccgggccagtcagagtattagtagctggttggcctggtatcagcagaaaccagggaaagcccctaagctcctgatctataaagcctccagtttggaaagtggggtcccatcaaggttcagcggcagtggatctgggacagaattcactctcaccatcagcagcctgcagcctgatgattttgcaacttattactgccagcaggtcagcagttaccctacttttggcggagggaccaaggttgagatcaaa

SEQ ID NO: 621 - protein, 106 aa, Artificial sequence
  BIIB-12-920 VL Amino Acid Sequence
EIVMTQSPATLSVSPGERATLSCRASQSVSSNLAWYQQKPGQAPRLLIYSASTRATGIPARFSGSGSGTEFTLTISSLQSEDFAVYYCQQANAYPPTFGGGTKVEI

SEQ ID NO: 622 - DNA, 321 bp, Artificial sequence
  BIIB-12-920 VL Nucleic Acid Sequence
gaaatagtgatgacgcagtctccagccaccctgtctgtgtctccaggggaaagagccaccctctcctgcagggccagtcagagtgttagcagcaacttagcctggtaccagcagaaacctggccaggctcccaggctcctcatctatagcgcatccaccagggccactggtatcccagccaggttcagtggcagtgggtctgggacagagttcactctcaccatcagcagcctgcagtctgaagattttgcagtttattactgtcagcaggccaatgcctaccctcctacttttggcggagggaccaaggttgagatcaaa

SEQ ID NO: 623 - protein, 107 aa, Artificial sequence
  BIIB-12-921 VL Amino Acid Sequence
DIQMTQSPSSVSASVGDRVTITCRASQGISRWLAWYQQKPGKAPKLLIYAASSLQSGVPSRFSGSGSGTDFTLTISSLQPEDFATYYCQQGNVFPLTFGGGTKVEIK

SEQ ID NO: 624 - DNA, 321 bp, Artificial sequence
  BIIB-12-921 VL Nucleic Acid Sequence
gacatccagatgacccagtctccatcttccgtgtctgcatctgtaggagacagagtcaccatcacttgtcgggcgagtcagggtattagcaggtggttagcctggtatcagcagaaaccagggaaagcccctaagctcctgatctatgctgcatccagtttgcaaagtggggtcccatcaaggttcagcggcagtggatctgggacagatttcactctcaccatcagcagcctgcagcctgaagattttgcaacttactactgtcagcagggaaatgtcttccctctcacttttggcggagggaccaaggttgagatcaaa

SEQ ID NO: 625 - protein, 112 aa, Artificial sequence
  BIIB-12-922 VL Amino Acid Sequence
DIVMTQSPLSLPVTPGEPASISCRSSQSLLHSNGYNYLDWYLQKPGQSPQLLIYLGSNRASGVPDRFSGSGSGTDFTLKISRVEAEDVGVYYCMQALQTPITFGGGTKVEIK

SEQ ID NO: 626 - DNA, 336 bp, Artificial sequence
  BIIB-12-922 VL Nucleic Acid Sequence
gatattgtgatgactcagtctccactctccctgcccgtcacccctggagagccggcctccatctcctgcaggtctagtcagagcctcctgcatagtaatggatacaactatttggattggtacctgcagaagccagggcagtctccacagctcctgatctatttgggttctaatcgggcctccggggtccctgacaggttcagtggcagtggatcaggcacagattttacactgaaaatcagcagagtggaggctgaggatgttggggtttattactgcatgcaggcactacagactcctatcacttttggcggagggaccaaggttgagatcaaa

SEQ ID NO: 627 - protein, 107 aa, Artificial sequence
  BIIB-12-923 VL Amino Acid Sequence
DIQMTQSPSTLSASVGDRVTITCRASQSISSWLAWYQQKPGKAPKLLIYKASSLESGVPSRFSGSGSGTEFTLTISSLQPDDFATYYCQQFKSLSFTFGGGTKVEIK

SEQ ID NO: 628 - DNA, 321 bp, Artificial sequence
  BIIB-12-923 VL Nucleic Acid Sequence
gacatccagatgacccagtctccttccaccctgtctgcatctgtaggagacagagtcaccatcacttgccgggccagtcagagtattagtagctggttggcctggtatcagcagaaaccagggaaagcccctaagctcctgatctataaagcctccagtttggaaagtggggtcccatcaaggttcagcggcagtggatctgggacagaattcactctcaccatcagcagcctgcagcctgatgattttgcaacttattactgccagcagttcaaaagtctctctttcacttttggcggagggaccaaggttgagatcaaa

SEQ ID NO: 629 - protein, 107 aa, Artificial sequence
  BIIB-12-924 VL Amino Acid Sequence
DIQMTQSPSSVSASVGDRVTITCRASQGISSWLAWYQQKPGKAPKLLIYAASSLQSGVPSRFSGSGSGTDFTLTISSLQPEDFATYYCQQGNSFPLTFGGGTKVEIK

SEQ ID NO: 630 - DNA, 321 bp, Artificial sequence
  BIIB-12-924 VL Nucleic Acid Sequence
gacatccagatgacccagtctccatcttccgtgtctgcatctgtaggagacagagtcaccatcacttgtcgggcgagtcagggtattagcagctggttagcctggtatcagcagaaaccagggaaagcccctaagctcctgatctatgctgcatccagtttgcaaagtggggtcccatcaaggttcagcggcagtggatctgggacagatttcactctcaccatcagcagcctgcagcctgaagattttgcaacttattactgtcagcagggaaattccttccctctcacttttggcggagggaccaaggttgagatcaaa

SEQ ID NO: 631 - protein, 107 aa, Artificial sequence
  BIIB-12-926 VL Amino Acid Sequence
EIVMTQSPATLSVSPGERATLSCRASQSVSSNLAWYQQKPGQAPRLLIYGASTRATGIPARFSGSGSGTEFTLTISSLQSEDFAVYYCQQHSFWPPTFGGGTKVEIK

SEQ ID NO: 632 - DNA, 321 bp, Artificial sequence
  BIIB-12-926 VL Nucleic Acid Sequence
gaaatagtgatgacgcagtctccagccaccctgtctgtgtctccaggggaaagagccaccctctcctgcagggccagtcagagtgttagcagcaacttagcctggtaccagcagaaacctggccaggctcccaggctcctcatctatggtgcatccaccagggccactggtatcccagccaggttcagtggcagtgggtctgggacagagttcactctcaccatcagcagcctgcagtctgaagattttgcagtttattactgtcagcagcactccttctggcctcctacttttggcggagggaccaaggttgagatcaaa

SEQ ID NO: 633 - protein, 107 aa, Artificial sequence
  BIIB-12-927 VL Amino Acid Sequence
EIVMTQSPATLSVSPGERATLSCRASQSVSSNLAWYQQKPGQAPRLLIYGASTRATGIPARFSGSGSGTEFTLTISSLQSEDFAVYYCQQFNLWPFTFGGGTKVEIK

SEQ ID NO: 634 - DNA, 321 bp, Artificial sequence
  BIIB-12-927 VL Nucleic Acid Sequence
gaaatagtgatgacgcagtctccagccaccctgtctgtgtctccaggggaaagagccaccctctcctgcagggccagtcagagtgttagcagcaacttagcctggtaccagcagaaacctggccaggctcccaggctcctcatctatggtgcatccaccagggccactggtatcccagccaggttcagtggcagtgggtctgggacagagttcactctcaccatcagcagcctgcagtctgaagattttgcagtttattactgtcagcagttcaatctctggcctttcacttttggcggagggaccaaggttgagatcaaa

SEQ ID NO: 635 - protein, 108 aa, Artificial sequence
  BIIB-12-928 VL Amino Acid Sequence
EIVLTQSPGTLSLSPGERATLSCRASQSVRSSYLAWYQQKPGQAPRLLIYGASSRATGIPDRFSGSGSGTDFTLTISRLEPEDFAVYYCQQYVRFPLTFGGGTKVEIK

SEQ ID NO: 636 - DNA, 324 bp, Artificial sequence
  BIIB-12-928 VL Nucleic Acid Sequence
gaaattgtgttgacgcagtctccaggcaccctgtctttgtctccaggggaaagagccaccctctcctgcagggccagtcagagtgttaggagcagctacttagcctggtaccagcagaaacctggccaggctcccaggctcctcatctatggtgcatccagcagggccactggcatcccagacaggttcagtggcagtgggtctgggacagacttcactctcaccatcagcagactggagcctgaagattttgcagtgtattactgtcagcagtacgtacgtttccctctcacttttggcggagggaccaaggttgagatcaaa

SEQ ID NO: 637 - protein, 113 aa, Artificial sequence
  BIIB-12-929 VL Amino Acid Sequence
DIVMTQSPDSLAVSLGERATINCKSSQSVLYSSNNKNYLAWYQQKPGQPPKLLISWASTRESGVPDRFSGSGSGTDFTLTISSLQAEDVAVYYCQQYFSLPFTFGGGTKVEIK

SEQ ID NO: 638 - DNA, 339 bp, Artificial sequence
  BIIB-12-929 VL Nucleic Acid Sequence
gacatcgtgatgacccagtctccagactccctggctgtgtctctgggcgagagggccaccatcaactgcaagtccagccagagtgttttatacagctccaacaataagaactacttagcttggtaccagcagaaaccaggacagcctcctaagctgctcatttcctgggcatctacccgggaatccggggtccctgaccgattcagtggcagcgggtctgggacagatttcactctcaccatcagcagcctgcaggctgaagatgtggcagtttattactgtcagcagtacttcagtctccctttcacttttggcggagggaccaaggttgagatcaaa

SEQ ID NO: 639 - protein, 113 aa, Artificial sequence
  BIIB-12-930 VL Amino Acid Sequence
DIVMTQSPDSLAVSLGERATINCKSSQSVLFSSNNKNYLAWYQQKPGQPPKLLIYWASTRESGVPDRFSGSGSGTDFTLTISSLQAEDVAVYYCQQYFLSPFTFGGGTKVEIK

SEQ ID NO: 640 - DNA, 339 bp, Artificial sequence
  BIIB-12-930 VL Nucleic Acid Sequence
gacatcgtgatgacccagtctccagactccctggctgtgtctctgggcgagagggccaccatcaactgcaagtccagccagagtgttttattcagctccaacaataagaactacttagcttggtaccagcagaaaccaggacagcctcctaagctgctcatttactgggcatctacccgggaatccggggtccctgaccgattcagtggcagcgggtctgggacagatttcactctcaccatcagcagcctgcaggctgaagatgtggcagtttattactgtcagcagtacttcctctcccctttcacttttggcggagggaccaaggttgagatcaaa

SEQ ID NO: 641 - protein, 107 aa, Artificial sequence
  BIIB-12-931 VL Amino Acid Sequence
EIVMTQSPATLSVSPGERATLSCRASQSVSSNLAWYQQKPGQAPRLLIYGASTRATGIPARFSGSGSGTEFTLTISSLQSEDFAVYYCQQAAYWPWTFGGGTKVEIK

SEQ ID NO: 642 - DNA, 321 bp, Artificial sequence
  BIIB-12-931 VL Nucleic Acid Sequence
gaaatagtgatgacgcagtctccagccaccctgtctgtgtctccaggggaaagagccaccctctcctgcagggccagtcagagtgttagcagcaacttagcctggtaccagcagaaacctggccaggctcccaggctcctcatctatggtgcatccaccagggccactggtatcccagccaggttcagtggcagtgggtctgggacagagttcactctcaccatcagcagcctgcagtctgaagattttgcagtttattactgtcagcaggccgcctactggccttggacttttggcggagggaccaaggttgagatcaaa

SEQ ID NO: 643 - protein, 106 aa, Artificial sequence
  BIIB-12-932 VL Amino Acid Sequence
DIQMTQSPSSLSASVGDRVTITCRASQSISSYLNWYQQKPGKAPKLLIYAASSLQSGVPSRFSGSGSGTDFTLTISSLQPEDFATYYCQQSHSAPTFGGGTKVEIK

SEQ ID NO: 644 - DNA, 318 bp, Artificial sequence
  BIIB-12-932 VL Nucleic Acid Sequence
gacatccagatgacccagtctccatcctccctgtctgcatctgtaggagacagagtcaccatcacttgccgggcaagtcagagcattagcagctatttaaattggtatcagcagaaaccagggaaagcccctaagctcctgatctatgctgcatccagtttgcaaagtggggtcccatcaaggttcagtggcagtggatctgggacagatttcactctcaccatcagcagtctgcaacctgaagattttgcaacttactactgtcagcaaagccacagtgcccctacttttggcggagggaccaaggttgagatcaaa

SEQ ID NO: 645 - protein, 108 aa, Artificial sequence
  BIIB-12-933 VL Amino Acid Sequence
EIVLTQSPGTLSLSPGERATLSCRASQSVSSSYLAWYQQKPGQAPRLLIYGASSRATGIPDRFSGSGSGTDFTLTISRLEPEDFAVYYCQQYSRSPITFGGGTKVEIK

SEQ ID NO: 646 - DNA, 324 bp, Artificial sequence
  BIIB-12-933 VL Nucleic Acid Sequence
gaaattgtgttgacgcagtctccaggcaccctgtctttgtctccaggggaaagagccaccctctcctgcagggccagtcagagtgttagcagcagctacttagcctggtaccagcagaaacctggccaggctcccaggctcctcatctatggtgcatccagcagggccactggcatcccagacaggttcagtggcagtgggtctgggacagacttcactctcaccatcagcagactggagcctgaagattttgcagtgtattactgtcagcagtactcccgctcccctatcacttttggcggagggaccaaggttgagatcaaa

SEQ ID NO: 647 - protein, 106 aa, Artificial sequence
  BIIB-12-934 VL Amino Acid Sequence
EIVLTQSPATLSVSPGERATLSCRASQSVSSNLAWYQQKPGQAPRLLIYGASTRATGIPARFSGSGSGTEFTLTISSLQSEDFAVYYCQQFNDHPITFGGGTKVEI

SEQ ID NO: 648 - DNA, 321 bp, Artificial sequence
  BIIB-12-934 VL Nucleic Acid Sequence
gaaatagtgttgacgcagtctccagccaccctgtctgtgtctccaggggaaagagccaccctctcctgcagggccagtcagagtgttagcagcaacttagcctggtaccagcagaaacctggccaggctcccaggctcctcatctatggtgcatccaccagggccactggtatcccagccaggttcagtggcagtgggtctgggacagagttcactctcaccatcagcagcctgcagtctgaagattttgcagtttattactgtcagcagttcaatgaccaccctatcacttttggcggagggaccaaggttgagatcaaa

SEQ ID NO: 649 - protein, 108 aa, Artificial sequence
  BIIB-12-935 VL Amino Acid Sequence
EIVLTQSPGTLSLSPGERATLSCRASQSVSSSFLAWYQQKPGQAPRLLIYGASSRATGIPDRFSGSGSGTDFTLTISRLEPEDFAVYYCQQYSSSPITFGGGTKVEIK

SEQ ID NO: 650 - DNA, 324 bp, Artificial sequence
  BIIB-12-935 VL Nucleic Acid Sequence
gaaattgtgttgacgcagtctccaggcaccctgtctttgtctccaggggaaagagccaccctctcctgcagggccagtcagagtgttagcagcagcttcttagcctggtaccagcagaaacctggccaggctcccaggctcctcatctatggtgcatccagcagggccactggcatcccagacaggttcagtggcagtgggtctgggacagacttcactctcaccatcagcagactggagcctgaagattttgcagtgtattactgtcagcagtactccagttcccctatcacttttggcggagggaccaaggttgagatcaaa

SEQ ID NO: 651 - protein, 107 aa, Artificial sequence
  BIIB-12-936 VL Amino Acid Sequence
EIVMTQSPATLSVSPGERATLSCRASQSVSSNLAWYQQKPGQAPRLLIYGASTRATGIPARFSGSGSGTEFTLTISSLQSEDFAVYYCQQSHNLPPTFGGGTKVEIK

SEQ ID NO: 652 - DNA, 321 bp, Artificial sequence
  BIIB-12-936 VL Nucleic Acid Sequence
gaaatagtgatgacgcagtctccagccaccctgtctgtgtctccaggggaaagagccaccctctcctgcagggccagtcagagtgttagcagcaacttagcctggtaccagcagaaacctggccaggctcccaggctcctcatctatggtgcatccaccagggccactggtatcccagccaggttcagtggcagtgggtctgggacagagttcactctcaccatcagcagcctgcagtctgaagattttgcagtttattactgtcagcagtcccacaatctccctcctacttttggcggagggaccaaggttgagatcaaa

SEQ ID NO: 653 - protein, 112 aa, Artificial sequence
  BIIB-12-937 VL Amino Acid Sequence
DIVMTQSPLSLPVTPGEPASISCRSSQSLLHSNGYNYLDWYLQKPGQSPQLLIYLGSNRASGVPDRFSGSGSGTDFTLKISRVEAEDVGVYYCMQERQTPLTFGGGTKVEIK

SEQ ID NO: 654 - DNA, 336 bp, Artificial sequence
  BIIB-12-937 VL Nucleic Acid Sequence
gatattgtgatgactcagtctccactctccctgcccgtcacccctggagagccggcctccatctcctgcaggtctagtcagagcctcctgcatagtaatggatacaactatttggattggtacctgcagaagccagggcagtctccacagctcctgatctatttgggttctaatcgggcctccggggtccctgacaggttcagtggcagtggatcaggcacagattttacactgaaaatcagcagagtggaggctgaggatgttggggtttattactgcatgcaggaaagacaaactcctctcacttttggcggagggaccaaggttgagatcaaa

SEQ ID NO: 655 - protein, 113 aa, Artificial sequence
  BIIB-12-1288 VL Amino Acid Sequence
DIVMTQSPDSLAVSLGERATINCKSSQSVLYSSNNKNYLAWYQQKPGQPPKLLIYWASTRESGVPDRFSGSGSGTDFTLTISSLQAEDVAVYYCQQSFNTPFTFGGGTKVEIK

SEQ ID NO: 656 - DNA, 339 bp, Artificial sequence
  BIIB-12-1288 VL Nucleic Acid Sequence
gacatcgtgatgacccagtctccagactccctggctgtgtctctgggcgagagggccaccatcaactgcaagtccagccagagtgttttatacagctccaacaataagaactacttagcttggtaccagcagaaaccaggacagcctcctaagctgctcatttactgggcatctacccgggaatccggggtccctgaccgattcagtggcagcgggtctgggacagatttcactctcaccatcagcagcctgcaggctgaagatgtggcagtttattactgtcagcagtccttcaacactcctttcacttttggcggagggaccaaggttgagatcaaa

SEQ ID NO: 657 - protein, 113 aa, Artificial sequence
  BIIB-12-1289 VL Amino Acid Sequence
DIVMTQSPDSLAVSLGERATINCKSSQSVLYSSNNKNYLAWYQQKPGQPPKLLIYWASTRESGVPDRFSGSGSGTDFTLTISSLQAEDVAVYYCQQYYASPFTFGGGTKVEIK

SEQ ID NO: 658 - DNA, 339 bp, Artificial sequence
  BIIB-12-1289 VL Nucleic Acid Sequence
gacatcgtgatgacccagtctccagactccctggctgtgtctctgggcgagagggccaccatcaactgcaagtccagccagagtgttttatacagctccaacaataagaactacttagcttggtaccagcagaaaccaggacagcctcctaagctgctcatttactgggcatctacccgggaatccggggtccctgaccgattcagtggcagcgggtctgggacagatttcactctcaccatcagcagcctgcaggctgaagatgtggcagtttattactgtcagcagtactacgcctcccctttcacttttggcggagggaccaaggttgagatcaaa

SEQ ID NO: 659 - protein, 107 aa, Artificial sequence
  BIIB-12-1290 VL Amino Acid Sequence
DIQMTQSPSSVSASVGDRVTITCRASQGISSWLAWYQQKPGKAPKLLIYAASSLQSGVPSRFSGSGSGTDFTLTISSLQPEDFATYYCQQGFSFPFTFGGGTKVEIK

SEQ ID NO: 660 - DNA, 321 bp, Artificial sequence
  BIIB-12-1290 VL Nucleic Acid Sequence
gacatccagatgacccagtctccatcttccgtgtctgcatctgtaggagacagagtcaccatcacttgtcgggcgagtcagggtattagcagctggttagcctggtatcagcagaaaccagggaaagcccctaagctcctgatctatgctgcatccagtttgcaaagtggggtcccatcaaggttcagcggcagtggatctgggacagatttcactctcaccatcagcagcctgcagcctgaagattttgcaacttattactgtcagcagggattcagtttccctttcacttttggcggagggaccaaggttgagatcaaa

SEQ ID NO: 661 - protein, 107 aa, Artificial sequence; identical to SEQ ID NO: 567
  BIIB-12-1291 VL Amino Acid Sequence

SEQ ID NO: 662 - DNA, 320 bp, Artificial sequence
  BIIB-12-1291 VL Nucleic Acid Sequence
gaaattgtgttgacacagtctccagccaccctgtctttgtctccaggggaaagagccaccctctcctgcagggccagtcagagtgttagcagctacttagcctggtaccaacagaaacctggccaggctcccaggctcctcatctatgatgcatccaacagggccactggcatcccagccaggttcagtggcagtgggtctgggacagacttcactctcaccatcagcagcctagagcctgaagattttgcagtttattactgtcagcagagactcaatctccctctcacttttggcggagggaccaaggttgagatcaa

SEQ ID NO: 663 - protein, 107 aa, Artificial sequence; identical to SEQ ID NO: 325
  BIIB-12-1292 VL Amino Acid Sequence

SEQ ID NO: 664 - DNA, 321 bp, Artificial sequence
  BIIB-12-1292 VL Nucleic Acid Sequence
gaaattgtgatgacacagtctccagccaccctgtctttgtctccaggggaaagagccaccctctcctgcagggccagtcagagtgttagcagctacttagcctggtaccaacagaaacctggccaggctcccaggctcctcatctatgattcatccaacagggccactggcatcccagccaggttcagtggcagtgggtctgggacagacttcactctcaccatcagcagcctagagcctgaagattttgcagtttattactgtcagcagagactcaatttccctttcacttttggcggagggaccaaggttgagatcaaa

SEQ ID NO: 665 - protein, 107 aa, Artificial sequence
  BIIB-12-1293 VL Amino Acid Sequence
DIQMTQSPSSVSASVGDRVTITCRASQGISSWLAWYQQKPGKAPKLLIYAASSLQSGVPSRFSGSGSGTDFTLTISSLQPEDFATYYCQQANIFPFTFGGGTKVEIK

SEQ ID NO: 666 - DNA, 321 bp, Artificial sequence
  BIIB-12-1293 VL Nucleic Acid Sequence
gacatccagatgacccagtctccatcttccgtgtctgcatctgtaggagacagagtcaccatcacttgtcgggcgagtcagggtattagcagctggttagcctggtatcagcagaaaccagggaaagcccctaagctcctgatctatgctgcatccagtttgcaaagtggggtcccatcaaggttcagcggcagtggatctgggacagatttcactctcaccatcagcagcctgcagcctgaagattttgcaacttattactgtcagcaggcaaatatcttccctttcacttttggcggagggaccaaggttgagatcaaa

SEQ ID NO: 667 - protein, 107 aa, Artificial sequence
  BIIB-12-1294 VL Amino Acid Sequence
DIQMTQSPSTLSASVGDRVTITCRASQSISSWLAWYQQKPGKAPKLLIYKASSLESGVPSRFSGSGSGTEFTLTISSLQPDDFATYYCQQVNTFPFTFGGGTKVEIK

SEQ ID NO: 668 - DNA, 321 bp, Artificial sequence
  BIIB-12-1294 VL Nucleic Acid Sequence
gacatccagatgacccagtctccttccaccctgtctgcatctgtaggagacagagtcaccatcacttgccgggccagtcagagtattagtagctggttggcctggtatcagcagaaaccagggaaagcccctaagctcctgatctataaagcctccagtttggaaagtggggtcccatcaaggttcagcggcagtggatctgggacagaattcactctcaccatcagcagcctgcagcctgatgattttgcaacttattactgccagcaggtcaataccttccctttcacttttggcggagggaccaaggttgagatcaaa

SEQ ID NO: 669 - protein, 107 aa, Artificial sequence
  BIIB-12-1295 VL Amino Acid Sequence
DIQMTQSPSSVSASVGDRVTITCRASQGISSWLAWYQQKPGKAPKLLIYAASNLQSGVPSRFSGSGSGTDFTLTISSLQPEDFATYYCQQAISLPITFGGGTKVEIK

SEQ ID NO: 670 - DNA, 321 bp, Artificial sequence
  BIIB-12-1295 VL Nucleic Acid Sequence
gacatccagatgacccagtctccatcttccgtgtctgcatctgtaggagacagagtcaccatcacttgtcgggcgagtcagggtattagcagctggttagcctggtatcagcagaaaccagggaaagcccctaagctcctgatctatgctgcatccaatttgcaaagtggggtcccatcaaggttcagcggcagtggatctgggacagatttcactctcaccatcagcagcctgcagcctgaagattttgcaacttattactgtcagcaggcaatcagtctccctatcacttttggcggagggaccaaggttgagatcaaa

SEQ ID NO: 671 - protein, 108 aa, Artificial sequence
  BIIB-12-1296 VL Amino Acid Sequence
EIVLTQSPGTLSLSPGERATLSCRASQSVSSSYLAWYQQKPGQAPRLLIYGASSRATGIPDRFSGSGSGTDFTLTISRLEPEDFAVYYCQQYADSPLTFGGGTKVEIK

SEQ ID NO: 672 - DNA, 324 bp, Artificial sequence
  BIIB-12-1296 VL Nucleic Acid Sequence
gaaattgtgttgacgcagtctccaggcaccctgtctttgtctccaggggaaagagccaccctctcctgcagggccagtcagagtgttagcagcagctacttagcctggtaccagcagaaacctggccaggctcccaggctcctcatctatggtgcatccagcagggccactggcatcccagacaggttcagtggcagtgggtctgggacagacttcactctcaccatcagcagactggagcctgaagattttgcagtgtattactgtcagcagtacgccgacagtcctctcacttttggcggagggaccaaggttgagatcaaa

SEQ ID NO: 673 - protein, 107 aa, Artificial sequence
  BIIB-12-1297 VL Amino Acid Sequence
EIVLTQSPATLSLSPGERATLSCRASQSVSRYLAWYQQKPGQAPRLLIYDASNRATGIPARFSGSGSGTDFTLTISSLEPEDFAVYYCQQGNNWPPTFGGGTKVEIK

SEQ ID NO: 674 - DNA, 321 bp, Artificial sequence
  BIIB-12-1297 VL Nucleic Acid Sequence
gaaattgtgttgacacagtctccagccaccctgtctttgtctccaggggaaagagccaccctctcctgcagggccagtcagagtgttagcaggtacttagcctggtaccaacagaaacctggccaggctcccaggctcctcatctatgatgcatccaacagggccactggcatcccagccaggttcagtggcagtgggtctgggacagacttcactctcaccatcagcagcctagagcctgaagattttgcagtttattactgtcagcagggcaacaattggcctcctacttttggcggagggaccaaggttgagatcaaa

SEQ ID NO: 675 - protein, 107 aa, Artificial sequence
  BIIB-12-1298 VL Amino Acid Sequence
DIQMTQSPSSVSASVGDRVTITCRASQGISSWLAWYQQKPGKAPKLLIYAASSLQSGVPSRFSGSGSGTDFTLTISSLQPEDFATYYCQQTNSLPITFGGGTKVEIK

SEQ ID NO: 676 - DNA, 321 bp, Artificial sequence
  BIIB-12-1298 VL Nucleic Acid Sequence
gacatccagatgacccagtctccatcttccgtgtctgcatctgtaggagacagagtcaccatcacttgtcgggcgagtcagggtattagcagctggttagcctggtatcagcagaaaccagggaaagcccctaagctcctgatctatgctgcatccagtttgcaaagtggggtcccatcaaggttcagcggcagtggatctgggacagatttcactctcaccatcagcagcctgcagcctgaagattttgcaacttattactgtcagcagacaaatagtctccctatcacttttggcggagggaccaaggttgagatcaaa

SEQ ID NO: 677 - protein, 107 aa, Artificial sequence
  BIIB-12-1299 VL Amino Acid Sequence
EIVMTQSPATLSVSPGERATLSCRASQSVSSNLAWYQQKPGQAPRLLIYGASTRATGIPARFSGSGSGTEFTLTISSLQSEDFAVYYCQQLNNFPITFGGGTKVEIK

SEQ ID NO: 678 - DNA, 321 bp, Artificial sequence
  BIIB-12-1299 VL Nucleic Acid Sequence
gaaatagtgatgacgcagtctccagccaccctgtctgtgtctccaggggaaagagccaccctctcctgcagggccagtcagagtgttagcagcaacttagcctggtaccagcagaaacctggccaggctcccaggctcctcatctatggtgcatccaccagggccactggtatcccagccaggttcagtggcagtgggtctgggacagagttcactctcaccatcagcagcctgcagtctgaagattttgcagtttattactgtcagcagctcaataatttccctatcacttttggcggagggaccaaggttgagatcaaa

SEQ ID NO: 679 - protein, 107 aa, Artificial sequence; identical to SEQ ID NO: 351
  BIIB-12-1300 VL Amino Acid Sequence

SEQ ID NO: 680 - DNA, 321 bp, Artificial sequence; identical to SEQ ID NO: 352
  BIIB-12-1300 VL Nucleic Acid Sequence

SEQ ID NO: 681 - protein, 107 aa, Artificial sequence
  BIIB-12-1301 VL Amino Acid Sequence
EIVLTQSPATLSLSPGERATLSCRASQSVSSYLAWYQQKPGQAPRLLIYDASKRATGIPARFSGSGSGTDFTLTISSLEPEDFAVYYCQQSSSWPPTFGGGTKVEIK

SEQ ID NO: 682 - DNA, 321 bp, Artificial sequence
  BIIB-12-1301 VL Nucleic Acid Sequence
gaaattgtgttgacacagtctccagccaccctgtctttgtctccaggggaaagagccaccctctcctgcagggccagtcagagtgttagcagctacttagcctggtaccaacagaaacctggccaggctcccaggctcctcatctatgatgcatccaaaagggccactggcatcccagccaggttcagtggcagtgggtctgggacagacttcactctcaccatcagcagcctagagcctgaagattttgcagtttattactgtcagcagtccagttcctggcctcctacttttggcggagggaccaaggttgagatcaaa

SEQ ID NO: 683 - protein, 107 aa, Artificial sequence
  BIIB-12-1302 VL Amino Acid Sequence
EIVMTQSPATLSVSPGERATLSCRASQSVSSNLAWYQQKPGQAPRLLIYGASTRATGIPARFSGSGSGTEFTLTISSLQSEDFAVYYCQQVNNLPLTFGGGTKVEIK

SEQ ID NO: 684 - DNA, 321 bp, Artificial sequence
  BIIB-12-1302 VL Nucleic Acid Sequence
gaaatagtgatgacgcagtctccagccaccctgtctgtgtctccaggggaaagagccaccctctcctgcagggccagtcagagtgttagcagcaacttagcctggtaccagcagaaacctggccaggctcccaggctcctcatctatggtgcatccaccagggccactggtatcccagccaggttcagtggcagtgggtctgggacagagttcactctcaccatcagcagcctgcagtctgaagattttgcagtttattactgtcagcaggtcaataatctccctctcacttttggcggagggaccaaggttgagatcaaa

SEQ ID NO: 685 - protein, 107 aa, Artificial sequence; identical to SEQ ID NO: 353
  BIIB-12-1303 VL Amino Acid Sequence

SEQ ID NO: 686 - DNA, 321 bp, Artificial sequence; identical to SEQ ID NO: 354
  BIIB-12-1303 VL Nucleic Acid Sequence

SEQ ID NO: 687 - protein, 107 aa, Artificial sequence
  BIIB-12-1304 VL Amino Acid Sequence
EIVMTQSPATLSVSPGERATLSCRASQSVSSNLAWYQQKPGQAPRLLIYGASTRATGIPARFSGSGSGTEFTLTISSLQSEDFAVYYCQQANVLPLTFGGGTKVEIK

SEQ ID NO: 688 - DNA, 321 bp, Artificial sequence
  BIIB-12-1304 VL Nucleic Acid Sequence
gaaatagtgatgacgcagtctccagccaccctgtctgtgtctccaggggaaagagccaccctctcctgcagggccagtcagagtgttagcagcaacttagcctggtaccagcagaaacctggccaggctcccaggctcctcatctatggtgcatccaccagggccactggtatcccagccaggttcagtggcagtgggtctgggacagagttcactctcaccatcagcagcctgcagtctgaagattttgcagtttattactgtcagcaggccaatgtccttcctctcacttttggcggagggaccaaggttgagatcaaa

SEQ ID NO: 689 - protein, 107 aa, Artificial sequence
  BIIB-12-1305 VL Amino Acid Sequence
EIVLTQSPATLSLSPGERATLSCRASQSVSSYLAWYQQKPGQAPRLLIYDASNRATGIPARFSGSGSGTDFTLTISSLEPEDFAVYYCQQSANWPPTFGGGTKVEIK

SEQ ID NO: 690 - DNA, 321 bp, Artificial sequence
  BIIB-12-1305 VL Nucleic Acid Sequence
gaaattgtgttgacacagtctccagccaccctgtctttgtctccaggggaaagagccaccctctcctgcagggccagtcagagtgttagcagctacttagcctggtaccaacagaaacctggccaggctcccaggctcctcatctatgatgcatccaacagggccactggcatcccagccaggttcagtggcagtgggtctgggacagacttcactctcaccatcagcagcctagagcctgaagattttgcagtttattactgtcagcagtccgccaattggcctcctacttttggcggagggaccaaggttgagatcaaa

SEQ ID NO: 691 - protein, 113 aa, Artificial sequence
  BIIB-12-1306 VL Amino Acid Sequence
DIVMTQSPDSLAVSLGERATINCKSSQSVLYSSNNKNYLAWYQQKPGQPPKLLIYWASTRESGVPDRFSGSGSGTDFTLTISSLQAEDVAVYYCQQSVNTPLTFGGGTKVEIK

SEQ ID NO: 692 - DNA, 339 bp, Artificial sequence
  BIIB-12-1306 VL Nucleic Acid Sequence
gacatcgtgatgacccagtctccagactccctggctgtgtctctgggcgagagggccaccatcaactgcaagtccagccagagtgttttatacagctccaacaataagaactacttagcttggtaccagcagaaaccaggacagcctcctaagctgctcatttactgggcatctacccgggaatccggggtccctgaccgattcagtggcagcgggtctgggacagatttcactctcaccatcagcagcctgcaggctgaagatgtggcagtttattactgtcagcagtccgtcaacactcctctcacttttggcggagggaccaaggttgagatcaaa

SEQ ID NO: 693 - protein, 107 aa, Artificial sequence
  BIIB-12-1307 VL Amino Acid Sequence
DIQLTQSPSSLSASVGDRVTITCRASQSISSFLNWYQQKPGKAPKLLIYAASSLQSGVPSRFSGSGSGTDFTLTISSLQPEDFATYYCQQTYSTPLTFGGGTKVEIK

SEQ ID NO: 694 - DNA, 321 bp, Artificial sequence
  BIIB-12-1307 VL Nucleic Acid Sequence
gacatccagttgacccagtctccatcctccctgtctgcatctgtaggagacagagtcaccatcacttgccgggcaagtcagagcattagcagctttttaaattggtatcagcagaaaccagggaaagcccctaagctcctgatctatgctgcatccagtttgcaaagtggggtcccatcaaggttcagtggcagtggatctgggacagatttcactctcaccatcagcagtctgcaacctgaagattttgcaacttactactgtcagcaaacatacagtactcctctcacttttggcggagggaccaaggttgagatcaaa

SEQ ID NO: 695 - protein, 108 aa, Artificial sequence
  BIIB-12-1308 VL Amino Acid Sequence
EIVLTQSPGTLSLSPGERATLSCRASQSVSSDYLAWYQQKPGQAPRLLIYGASSRATGIPDRFSGSGSGTDFTLTISRLEPEDFAVYYCQQAGSFPPTFGGGTKVEIK

SEQ ID NO: 696 - DNA, 324 bp, Artificial sequence
  BIIB-12-1308 VL Nucleic Acid Sequence
gaaattgtgttgacgcagtctccaggcaccctgtctttgtctccaggggaaagagccaccctctcctgcagggccagtcagagtgttagcagcgactacttagcctggtaccagcagaaacctggccaggctcccaggctcctcatctatggtgcatccagcagggccactggcatcccagacaggttcagtggcagtgggtctgggacagacttcactctcaccatcagcagactggagcctgaagattttgcagtgtattactgtcagcaggccggaagtttccctcctacttttggcggagggaccaaggttgagatcaaa

SEQ ID NO: 697 - protein, 107 aa, Artificial sequence
  BIIB-12-1309 VL Amino Acid Sequence
DIQMTQSPSSVSASVGDRVTITCRASQGISSWLAWYQQKPGKAPKLLIYAASSLQSGVPSRFSGSGSGTDFTLTISSLQPEDFATYYCQQANSLPITFGGGTKVEIK

SEQ ID NO: 698 - DNA, 321 bp, Artificial sequence
  BIIB-12-1309 VL Nucleic Acid Sequence
gacatccagatgacccagtctccatcttccgtgtctgcatctgtaggagacagagtcaccatcacttgtcgggcgagtcagggtattagcagctggttagcctggtatcagcagaaaccagggaaagcccctaagctcctgatctatgctgcatccagtttgcaaagtggggtcccatcaaggttcagcggcagtggatctgggacagatttcactctcaccatcagcagcctgcagcctgaagattttgcaacttattactgtcagcaggcaaattccctccctatcacttttggcggagggaccaaggttgagatcaaa

SEQ ID NO: 699 - protein, 107 aa, Artificial sequence
  BIIB-12-1310 VL Amino Acid Sequence
EIVLTQSPATLSLSPGERATLSCRASQSVSRYLAWYQQKPGQAPRLLIYDASNRATGIPARFSGSGSGTDFTLTISSLEPEDFAVYYCEQASNWPPTFGGGTKVEIK

SEQ ID NO: 700 - DNA, 321 bp, Artificial sequence
  BIIB-12-1310 VL Nucleic Acid Sequence
gaaattgtgttgacacagtctccagccaccctgtctttgtctccaggggaaagagccaccctctcctgcagggccagtcagagtgttagcaggtacttagcctggtaccaacagaaacctggccaggctcccaggctcctcatctatgatgcatccaacagggccactggcatcccagccaggttcagtggcagtgggtctgggacagacttcactctcaccatcagcagcctagagcctgaagattttgcagtttattactgtgaacaggccagtaattggcctcctacttttggcggagggaccaaggttgagatcaaa

SEQ ID NO: 701 - protein, 107 aa, Artificial sequence
  BIIB-12-1311 VL Amino Acid Sequence
EIVLTQSPATLSLSPGERATLSCRASQSVSSYLAWYQQKPGQAPRLLIYDASNRATGIPARFSGSGSGTDFTLTISSLEPEDFAVYYCQQASNLPPTFGGGTKVEIK

SEQ ID NO: 702 - DNA, 320 bp, Artificial sequence
  BIIB-12-1311 VL Nucleic Acid Sequence
gaaattgtgttgacacagtctccagccaccctgtctttgtctccaggggaaagagccaccctctcctgcagggccagtcagagtgttagcagctacttagcctggtaccaacagaaacctggccaggctcccaggctcctcatctatgatgcatccaacagggccactggcatcccagccaggttcagtggcagtgggtctgggacagacttcactctcaccatcagcagcctagagcctgaagattttgcagtttattactgtcagcaggcctccaatctccctcctacttttggcggagggaccaaggttgagatcaa

SEQ ID NO: 703 - protein, 107 aa, Artificial sequence; identical to SEQ ID NO: 351
  BIIB-12-1312 VL Amino Acid Sequence

SEQ ID NO: 704 - DNA, 321 bp, Artificial sequence; identical to SEQ ID NO: 352
  BIIB-12-1312 VL Nucleic Acid Sequence

SEQ ID NO: 705 - protein, 107 aa, Artificial sequence; identical to SEQ ID NO: 357
  BIIB-12-1313 VL Amino Acid Sequence

SEQ ID NO: 706 - DNA, 321 bp, Artificial sequence; identical to SEQ ID NO: 358
  BIIB-12-1313 VL Nucleic Acid Sequence

SEQ ID NO: 707 - protein, 107 aa, Artificial sequence
  BIIB-12-1314 VL Amino Acid Sequence
DIQMTQSPSSVSASVGDRVTITCRASQGISSWLAWYQQKPGKAPKLLIYAASSLQSGVPSRFSGSGSGTDFTLTISSLQPEDFATYYCQQANFFPITFGGGTKVEIK

SEQ ID NO: 708 - DNA, 321 bp, Artificial sequence
  BIIB-12-1314 VL Nucleic Acid Sequence
gacatccagatgacccagtctccatcttccgtgtctgcatctgtaggagacagagtcaccatcacttgtcgggcgagtcagggtattagcagctggttagcctggtatcagcagaaaccagggaaagcccctaagctcctgatctatgctgcatccagtttgcaaagtggggtcccatcaaggttcagcggcagtggatctgggacagatttcactctcaccatcagcagcctgcagcctgaagattttgcaacttattactgtcagcaggcaaatttcttccctatcacttttggcggagggaccaaggttgagatcaaa

SEQ ID NO: 709 - protein, 108 aa, Artificial sequence
  BIIB-12-1315 VL Amino Acid Sequence
EIVMTQSPATLSVSPGERATLSCRASQSVSSNLAWYQQKPGQAPRLLIYGASTRATGIPARFSGSGSGTEFTLTISSLQSEDFAVYYCQQVFNWPPWTFGGGTKVEIK

SEQ ID NO: 710 - DNA, 324 bp, Artificial sequence
  BIIB-12-1315 VL Nucleic Acid Sequence
gaaatagtgatgacgcagtctccagccaccctgtctgtgtctccaggggaaagagccaccctctcctgcagggccagtcagagtgttagcagcaacttagcctggtaccagcagaaacctggccaggctcccaggctcctcatctatggtgcatccaccagggccactggtatcccagccaggttcagtggcagtgggtctgggacagagttcactctcaccatcagcagcctgcagtctgaagattttgcagtttattactgtcagcaggtcttcaattggcctccttggacttttggcggagggaccaaggttgagatcaaa

SEQ ID NO: 711 - protein, 107 aa, Artificial sequence
  BIIB-12-1316 VL Amino Acid Sequence
DIQMTQSPSSVSASVGDRVTITCRASQGISSWLAWYQQKPGKAPKLLIYAASSLQSGVPSRFSGSGSGTDFTLTISSLQPEDFATYYCQQINNFPPTFGGGTKVEIK

SEQ ID NO: 712 - DNA, 321 bp, Artificial sequence
  BIIB-12-1316 VL Nucleic Acid Sequence
gacatccagatgacccagtctccatcttccgtgtctgcatctgtaggagacagagtcaccatcacttgtcgggcgagtcagggtattagcagctggttagcctggtatcagcagaaaccagggaaagcccctaagctcctgatctatgctgcatccagtttgcaaagtggggtcccatcaaggttcagcggcagtggatctgggacagatttcactctcaccatcagcagcctgcagcctgaagattttgcaacttattactgtcagcagataaataacttccctcctacttttggcggagggaccaaggttgagatcaaa

SEQ ID NO: 713 - protein, 107 aa, Artificial sequence
  BIIB-12-1317 VL Amino Acid Sequence
DIQMTQSPSSVSASVGDRVTITCRASQGISSWLAWYQQKPGKAPKLLIYAASSLQSGVPSRFSGSGSGTDFTLTISSLQPEDFATYYCQQRHSLPPTFGGGTKVEIK

SEQ ID NO: 714 - DNA, 321 bp, Artificial sequence
  BIIB-12-1317 VL Nucleic Acid Sequence
gacatccagatgacccagtctccatcttccgtgtctgcatctgtaggagacagagtcaccatcacttgtcgggcgagtcagggtattagcagctggttagcctggtatcagcagaaaccagggaaagcccctaagctcctgatctatgctgcatccagtttgcaaagtggggtcccatcaaggttcagcggcagtggatctgggacagatttcactctcaccatcagcagcctgcagcctgaagattttgcaacttattactgtcagcagagacacagtctccctcctacttttggcggagggaccaaggttgagatcaaa

SEQ ID NO: 715 - protein, 107 aa, Artificial sequence
  BIIB-12-1318 VL Amino Acid Sequence
EIVLTQSPATLSLSPGERATLSCRASQSVSSYLAWYQQKPGQAPRLLIYDASNRATGIPARFSGSGSGTDFTLTISSLEPEDFAVYYCQQLNNWPPTFGGGTKVEIK

SEQ ID NO: 716 - DNA, 321 bp, Artificial sequence
  BIIB-12-1318 VL Nucleic Acid Sequence
gaaattgtgttgacacagtctccagccaccctgtctttgtctccaggggaaagagccaccctctcctgcagggccagtcagagtgttagcagctacttagcctggtaccaacagaaacctggccaggctcccaggctcctcatctatgatgcatccaacagggccactggcatcccagccaggttcagtggcagtgggtctgggacagacttcactctcaccatcagcagcctagagcctgaagattttgcagtttattactgtcagcagctcaacaattggcctcctacttttggcggagggaccaaggttgagatcaaa

SEQ ID NO: 717 - protein, 106 aa, Artificial sequence
  BIIB-12-1319 VL Amino Acid Sequence
EIVMTQSPATLSVSPGERATLSCRASQSVSSNLAWYQQKPGQAPRLLIYGASTRATGIPARFSGSGSGTEFTLTISSLQSEDFAVYYCQQASNFPPTFGGGTKVEI

SEQ ID NO: 718 - DNA, 321 bp, Artificial sequence; identical to SEQ ID NO: 364
  BIIB-12-1319 VL Nucleic Acid Sequence

SEQ ID NO: 719 - protein, 113 aa, Artificial sequence
  BIIB-12-1322 VL Amino Acid Sequence
DIVMTQSPDSLAVSLGERATINCKSSQSVLYSSNNKNYLAWYQQKPGQPPKLLISWASTRESGVPDRFSGSGSGTDFTLTISSLQAEDVAVYYCQQSYFTPFTFGGGTKVEIK

SEQ ID NO: 720 - DNA, 338 bp, Artificial sequence
  BIIB-12-1322 VL Nucleic Acid Sequence
acatcgtgatgacccagtctccagactccctggctgtgtctctgggcgagagggccaccatcaactgcaagtccagccagagtgttttatacagctccaacaataagaactacttagcttggtaccagcagaaaccaggacagcctcctaagctgctcatttcctgggcatctacccgggaatccggggtccctgaccgattcagtggcagcgggtctgggacagatttcactctcaccatcagcagcctgcaggctgaagatgtggcagtttattactgtcagcagtcctacttcactcctttcacttttggcggagggaccaaggttgagatcaaa

SEQ ID NO: 721 - protein, 107 aa, Artificial sequence; identical to SEQ ID NO: 665
  BIIB-12-1323 VL Amino Acid Sequence

SEQ ID NO: 722 - DNA, 321 bp, Artificial sequence; identical to SEQ ID NO: 666
  BIIB-12-1323 VL Nucleic Acid Sequence

SEQ ID NO: 723 - protein, 106 aa, Artificial sequence
  BIIB-12-1324 VL Amino Acid Sequence
EIVMTQSPATLSLSPGERATLSCRASQSVSSYLAWYQQKPGQAPRLLIYDSSNRATGIPARFSGSGSGTDFTLTISSLEPEDFAVYYCQQLVSWPTFGGGTKVEIK

SEQ ID NO: 724 - DNA, 318 bp, Artificial sequence
  BIIB-12-1324 VL Nucleic Acid Sequence
gaaattgtgatgacacagtctccagccaccctgtctttgtctccaggggaaagagccaccctctcctgcagggccagtcagagtgttagcagctacttagcctggtaccaacagaaacctggccaggctcccaggctcctcatctatgattcatccaacagggccactggcatcccagccaggttcagtggcagtgggtctgggacagacttcactctcaccatcagcagcctagagcctgaagattttgcagtttattactgtcagcagctcgtctcctggcctacttttggcggagggaccaaggttgagatcaaa

SEQ ID NO: 725 - protein, 107 aa, Artificial sequence
  BIIB-12-1325 VL Amino Acid Sequence
DIQMTQSPSTLSASVGDRVTITCRASQSISSWLAWYQQKPGKAPKLLIYKASSLESGVPSRFSGSGSGTEFTLTISSLQPDDFATYYCQQSNRYPRTFGGGTKVEIK

SEQ ID NO: 726 - DNA, 321 bp, Artificial sequence
  BIIB-12-1325 VL Nucleic Acid Sequence
gacatccagatgacccagtctccttccaccctgtctgcatctgtaggagacagagtcaccatcacttgccgggccagtcagagtattagtagctggttggcctggtatcagcagaaaccagggaaagcccctaagctcctgatctataaagcctccagtttggaaagtggggtcccatcaaggttcagcggcagtggatctgggacagaattcactctcaccatcagcagcctgcagcctgatgattttgcaacttattactgccagcagtccaatcgctaccctaggacttttggcggagggaccaaggttgagatcaaa

SEQ ID NO: 727 - protein, 108 aa, Artificial sequence
  BIIB-12-1326 VL Amino Acid Sequence
EIVLTQSPGTLSLSPGERATLSCRASQSVRSSYLAWYQQKPGQAPRLLIYGASSRATGIPDRFSGSGSGTDFTLTISRLEPEDFAVYYCQQAYSSPLTFGGGTKVEIK

SEQ ID NO: 728 - DNA, 324 bp, Artificial sequence
  BIIB-12-1326 VL Nucleic Acid Sequence
gaaattgtgttgacgcagtctccaggcaccctgtctttgtctccaggggaaagagccaccctctcctgcagggccagtcagagtgttaggagcagctacttagcctggtaccagcagaaacctggccaggctcccaggctcctcatctatggtgcatccagcagggccactggcatcccagacaggttcagtggcagtgggtctgggacagacttcactctcaccatcagcagactggagcctgaagattttgcagtgtattactgtcagcaggcctacagttcccctttgacttttggcggagggaccaaggttgagatcaaa

SEQ ID NO: 729 - protein, 107 aa, Artificial sequence
  BIIB-12-1327 VL Amino Acid Sequence
EIVMTQSPATQYVSPGERATLSCRASQSVSSNLAWYQQKPGQAPRLLIYGASTRATGIPARFSGSGSGTEFTLTISSLQSEDFAVYYCQQYHNFPPTFGGGTKVEIK

SEQ ID NO: 730 - DNA, 321 bp, Artificial sequence
  BIIB-12-1327 VL Nucleic Acid Sequence
gaaatagtgatgacgcagtctccagccacccagtatgtgtctccaggggaaagagccaccctctcctgcagggccagtcagagtgttagcagcaacttagcctggtaccagcagaaacctggccaggctcccaggctcctcatctatggtgcatccaccagggccactggtatcccagccaggttcagtggcagtgggtctgggacagagttcactctcaccatcagcagcctgcagtctgaagattttgcagtttattactgtcagcagtaccacaatttccctcctacttttggcggagggaccaaggttgagatcaaa

SEQ ID NO: 731 - protein, 107 aa, Artificial sequence
  BIIB-12-1328 VL Amino Acid Sequence
EIVMTQSPATLSVSPGERATLSCRASQSVSSNLAWYQQKPGQAPRLLIYGASTRATGIPARFSGSGSGTEFTLTISSLQSEDFAVYYCQQPNSYPLTFGGGTKVEIK

SEQ ID NO: 732 - DNA, 321 bp, Artificial sequence
  BIIB-12-1328 VL Nucleic Acid Sequence
gaaatagtgatgacgcagtctccagccaccctgtctgtgtctccaggggaaagagccaccctctcctgcagggccagtcagagtgttagcagcaacttagcctggtaccagcagaaacctggccaggctcccaggctcctcatctatggtgcatccaccagggccactggtatcccagccaggttcagtggcagtgggtctgggacagagttcactctcaccatcagcagcctgcagtctgaagattttgcagtttattactgtcagcagcccaattcctaccctctcacttttggcggagggaccaaggttgagatcaaa

SEQ ID NO: 733 - protein, 107 aa, Artificial sequence
  BIIB-12-1329 VL Amino Acid Sequence
EIVMTQSPATKSVSPGERATLSCRASQSVSSNLAWYQQKPGQAPRLLIYSASTRATGIPARFSGSGSGTEFTLTISSLQSEDFAVYYCQQVFNWPPTFGGGTKVKIK

SEQ ID NO: 734 - DNA, 321 bp, Artificial sequence
  BIIB-12-1329 VL Nucleic Acid Sequence
gaaatagtgatgacgcagtctccagccaccaagtctgtgtctccaggggaaagagccaccctctcctgcagggccagtcagagtgttagcagcaacttagcctggtaccagcagaaacctggccaggctcccaggctcctcatctatagcgcatccaccagggccactggtatcccagccaggttcagtggcagtgggtctgggacagagttcactctcaccatcagcagcctgcagtctgaagattttgcagtttattactgtcagcaggtcttcaattggcctcctacttttggcggagggaccaaggttaagatcaaa

SEQ ID NO: 735 - protein, 106 aa, Artificial sequence
  BIIB-12-1330 VL Amino Acid Sequence
DIQMTQSPSSLSASVGDRVTITCRASQSISSYLNWYQQKPGKAPKLLIYAASSLQSGVPSRFSGSGSGTDFTLTISSLQPEDFATYYCQQAYSVPITFGGGTKVEI

SEQ ID NO: 736 - DNA, 321 bp, Artificial sequence
  BIIB-12-1330 VL Nucleic Acid Sequence
gacatccagatgacccagtctccatcctccctgtctgcatctgtaggagacagagtcaccatcacttgccgggcaagtcagagcattagcagctatttaaattggtatcagcagaaaccagggaaagcccctaagctcctgatctatgctgcatccagtttgcaaagtggggtcccatcaaggttcagtggcagtggatctgggacagatttcactctcaccatcagcagtctgcaacctgaagattttgcaacttactactgtcagcaagcatacagtgtccctatcacttttggcggagggaccaaggttgagatcaaa

SEQ ID NO: 737 - protein, 107 aa, Artificial sequence
  BIIB-12-1331 VL Amino Acid Sequence
EIVLTQSPAKKSLSPGERATLSCRASQSVSSYLAWYQQKPGQAPRLLIYDASNRATGIPARFSGSGSGTDFTLTISSLEPEDFAVYYCQQRVNLPITFGGGTKVVFK

SEQ ID NO: 738 - DNA, 321 bp, Artificial sequence
  BIIB-12-1331 VL Nucleic Acid Sequence
gaaattgtgttgacacagtctccagccaaaaagtctttgtctccaggggaaagagccaccctctcctgcagggccagtcagagtgttagcagctacttagcctggtaccaacagaaacctggccaggctcccaggctcctcatctatgatgcatccaacagggccactggcatcccagccaggttcagtggcagtgggtctgggacagacttcactctcaccatcagcagcctagagcctgaagattttgcagtttattactgtcagcagagagtcaatctccctatcacttttggcggagggaccaaggttgtgttcaaa

SEQ ID NO: 739 - protein, 107 aa, Artificial sequence
  BIIB-12-1332 VL Amino Acid Sequence
DIQMTQSPSSVSASVGDRVTITCRASQGISSWLAWYQQKPGKAPKLLIYAASSLQSGVPSRFSGSGSGTDFTLTISSLQPEDFATYYCQQVNSFPLTFGGGTKVEFK

SEQ ID NO: 740 - DNA, 321 bp, Artificial sequence
  BIIB-12-1332 VL Nucleic Acid Sequence
gacatccagatgacccagtctccatcttccgtatcagcatctgtaggagacagagtcaccatcacttgtcgggcgagtcagggtattagcagctggttagcctggtatcagcagaaaccagggaaagcccctaagctcctgatctatgctgcatccagtttgcaaagtggggtcccatcaaggttcagcggcagtggatctgggacagatttcactctcaccatcagcagcctgcagcctgaagattttgcaacttattactgtcagcaggtaaacagtttccctctcacttttggcggagggaccaaggttgagttcaaa

SEQ ID NO: 741 - protein, 106 aa, Artificial sequence
  BIIB-12-1333 VL Amino Acid Sequence
EIVMTQSPATLSVSPGERATLSCRASQSVSSNLAWYQQKPGQAPRLLIYGASTRATGIPARFSGSGSGTEFTLTISSLQSEDFAVYYCQQVNTWPTFGGGTKVEIK

SEQ ID NO: 742 - DNA, 318 bp, Artificial sequence
  BIIB-12-1333 VL Nucleic Acid Sequence
gaaatagtgatgacgcagtctccagccaccctgtctgtgtctccaggggaaagagccaccctctcctgcagggccagtcagagtgttagcagcaacttagcctggtaccagcagaaacctggccaggctcccaggctcctcatctatggtgcatccaccagggccactggtatcccagccaggttcagtggcagtgggtctgggacagagttcactctcaccatcagcagcctgcagtctgaagattttgcagtttattactgtcagcaggtcaatacctggcctacttttggcggagggaccaaggttgagatcaaa

SEQ ID NO: 743 - protein, 112 aa, Artificial sequence
  BIIB-12-1334 VL Amino Acid Sequence
DIVMTQSPLSLPVTPGEPASISCRSSQSLLHSNGYNYLDWYLQKPGQSPQLLIYLASNRASGVPDRFSGSGSGTDFTLKISRVEAEDVGVYYCMQRIGTPWTFGGGTKVEIK

SEQ ID NO: 744 - DNA, 336 bp, Artificial sequence
  BIIB-12-1334 VL Nucleic Acid Sequence
gatattgtgatgactcagtctccactctccctgcccgtcacccctggagagccggcctccatctcctgcaggtctagtcagagcctcctgcatagtaatggatacaactatttggattggtacctgcagaagccagggcagtctccacagctcctgatctatttggcttctaatcgggcctccggggtccctgacaggttcagtggcagtggatcaggcacagattttacactgaaaatcagcagagtggaggctgaggatgttggggtttattactgcatgcagagaataggcactccttggacttttggcggagggaccaaggttgagatcaaa

SEQ ID NO: 745 - protein, 106 aa, Artificial sequence
  BIIB-12-894 VL Amino Acid Sequence
DIQMTQSPSSLSASVGDRVTITCQASQDISNYLNWYQQKPGKAPKLLIYDASNLETGVPSRFSGSGSGTDFTFTISSLQPEDIATYYCQQDDALPFTFGGGTKVEI

SEQ ID NO: 746 - DNA, 320 bp, Artificial sequence
  BIIB-12-894 VL Nucleic Acid Sequence
gacatccagatgacccagtctccatcctccctgtctgcatctgtaggagacagagtcaccatcacttgccaggcgagtcaggacattagcaactatttaaattggtatcagcagaaaccagggaaagcccctaagctcctgatctacgatgcatccaatttggaaacaggggtcccatcaaggttcagtggaagtggatctgggacagattttactttcaccatcagcagcctgcagcctgaagatattgcaacatattactgtcagcaggacgatgccctccctttcacttttggcggagggaccaaggttgagatcaa

SEQ ID NO: 747 - protein, 108 aa, Artificial sequence
  BIIB-12-925 VL Amino Acid Sequence
EIVLTQSPGTLSLSPGERATLSCRASQSVSSSYLAWYQQKPGQAPRLLIYGASSRATGIPDRFSGSGSGTDFTLTISRLEPEDFAVYYCQQSGGSPLTFGGGTKVEIK

SEQ ID NO: 748 - DNA, 324 bp, Artificial sequence
  BIIB-12-925 VL Nucleic Acid Sequence
gaaattgtgttgacgcagtctccaggcaccctgtctttgtctccaggggaaagagccaccctctcctgcagggccagtcagagtgttagcagcagctacttagcctggtaccagcagaaacctggccaggctcccaggctcctcatctatggtgcatccagcagggccactggcatcccagacaggttcagtggcagtgggtctgggacagacttcactctcaccatcagcagactggagcctgaagattttgcagtgtattactgtcagcagtccggaggctcccctctcacttttggcggagggaccaaggttgagatcaaa

SEQ ID NO: 749 - protein, 107 aa, Artificial sequence
  BIIB-12-1320 VL Amino Acid Sequence
DIQMTQSPSSLSASVGDRVTITCRASQSISSYLNWYQQKPGKAPKLLIYAASSLQSGVPSRFSGSGSGTDFTLTISSLQPEDFATYYCQQADDTPWTFGGGTKVEIK

SEQ ID NO: 750 - DNA, 321 bp, Artificial sequence
  BIIB-12-1320 VL Nucleic Acid Sequence
gacatccagatgacccagtctccatcctccctgtctgcatctgtaggagacagagtcaccatcacttgccgggcaagtcagagcattagcagctatttaaattggtatcagcagaaaccagggaaagcccctaagctcctgatctatgctgcatccagtttgcaaagtggggtcccatcaaggttcagtggcagtggatctgggacagatttcactctcaccatcagcagtctgcaacctgaagattttgcaacttactactgtcagcaagcagacgacactccttggacttttggcggagggaccaaggttgagatcaaa

SEQ ID NO: 751 - protein, 107 aa, Artificial sequence
  BIIB-12-1321 VL Amino Acid Sequence
EIVMTQSPATLSLSPGERATLSCRASQSVSSYLAWYQQKPGQAPRLLIYDSSNRATGIPARFSGSGSGTDFTLTISSLEPEDFAVYYCQQFTNLPYTFGGGTKVEIK

SEQ ID NO: 752 - DNA, 321 bp, Artificial sequence
  BIIB-12-1321 VL Nucleic Acid Sequence
gaaattgtgatgacacagtctccagccaccctgtctttgtctccaggggaaagagccaccctctcctgcagggccagtcagagtgttagcagctacttagcctggtaccaacagaaacctggccaggctcccaggctcctcatctatgattcatccaacagggccactggcatcccagccaggttcagtggcagtgggtctgggacagacttcactctcaccatcagcagcctagagcctgaagattttgcagtttattactgtcagcagttcaccaatctcccttacacttttggcggagggaccaaggttgagatcaaa

SEQ ID NO: 753 - protein, 15 aa, Artificial Sequence
  VH CDR3 of anti-FIXa antibody
  MISC_FEATURE (4)..(5): Xaa can be V or G
  MISC_FEATURE (6)..(6): Xaa can be G or R
  MISC_FEATURE (7)..(7): Xaa can be Y or V
  MISC_FEATURE (8)..(8): Xaa can be A or S
  MISC_FEATURE (9)..(9): Xaa can be G or D
  MISC_FEATURE (12)..(12): Xaa can be G or none
ARDXXXXXXYYXMDV

SEQ ID NO: 754 - protein, 17 aa, Artificial Sequence
  VH CDR2 of anti-FIXa antibody
  MISC_FEATURE (5)..(5): Xaa can be S, G, or any conservative substitution
  MISC_FEATURE (6)..(6): Xaa can be S, E, or any conservative substitution
  MISC_FEATURE (13)..(13): Xaa can be D, E, or any conservative substitution
SISSXXSYIYYAXSVKG

SEQ ID NO: 755 - protein, 9 aa, Artificial Sequence
  VH CDR1 of anti-FIXa antibody
  MISC_FEATURE (4)..(4): Xaa can be S, G, or any conservative substitution
  MISC_FEATURE (7)..(7): Xaa can be D, S, or any conservative substitution
  MISC_FEATURE (9)..(9): Xaa can be H, N, or any conservative substitution
FTFXSYXMX

SEQ ID NO: 756 - protein, 145 aa, Artificial sequence
  BIIB-FIX-147a-LC Amino Acid Sequence (Light chain of activated Factor IX)
YNSGKLEEFVQGNLERECMEEKCSFEEAREVFENTERTTEFWKQYVDGDQCESNPCLNGGSCKDDINSYECWCPFGFEGKNCELDVTCNIKNGRCEQFCKNSADNKVVCSCTEGYRLAENQKSCEPAVPFPCGRVSVSQTSKLTR

SEQ ID NO: 757 - DNA, 435 bp, Artificial sequence
  BIIB-FIX-147a-LC Nucleic Acid Sequence
tataattcaggtaaattggaagagtttgttcaagggaatctagagagagaatgtatggaagaaaagtgtagttttgaagaagcacgagaagtttttgaaaacactgaaagaacaactgaattttggaagcagtatgttgatggagatcagtgtgagtccaatccatgtttaaatggcggcagttgcaaggatgacattaattcctatgaatgttggtgtccctttggatttgaaggaaagaactgtgaattagatgtaacatgtaacattaagaatggcagatgcgagcagttttgtaaaaatagtgctgataacaaggtggtttgctcctgtactgagggatatcgacttgcagaaaaccagaagtcctgtgaaccagcagtgccatttccatgtggaagagtttctgtttcacaaacttctaagctcacccgt

SEQ ID NO: 758 - protein, 256 aa, Artificial sequence
  BIIB-FIX-147a-HC Amino Acid Sequence (Heavy chain of activated FIX)
VVGGEDAKPGQFPWQVVLNGKVDAFCGGSIVNEKWIVTAAHCVETGVKITVVAGEHNIEETEHTEQKRNVIRIIPHHNYNAAINKYNHDIALLELDEPLVLNSYVTPICIADKEYTNIFLKFGSGYVSGWGRVFHKGRSALVLQYLRVPLVDRATCLRSTKFTIYNNMFCAGFHEGGRDSCQGDSGGPHVTEVEGTSFLTGIISWGEECAMKGKYGIYTKVSRYVNWIKEKTKLTGGGSGGGSLNDIFEAQKIEWH

SEQ ID NO: 759 - DNA, 768 bp, Artificial sequence
  BIIB-FIX-147a-HC Nucleic Acid Sequence
gttgttggtggagaagatgccaaaccaggtcaattcccttggcaggttgttttgaatggtaaagttgatgcattctgtggaggctctatcgttaatgaaaaatggattgtaactgctgcccactgtgttgaaactggtgttaaaattacagttgtcgcaggtgaacataatattgaggagacagaacatacagagcaaaagcgaaatgtgattcgaattattcctcaccacaactacaatgcagctattaataagtacaaccatgacattgcccttctggaactggacgaacccttagtgctaaacagctacgttacacctatttgcattgctgacaaggaatacacgaacatcttcctcaaatttggatctggctatgtaagtggctggggaagagtcttccacaaagggagatcagctttagttcttcagtaccttagagttccacttgttgaccgagccacatgtcttcgatctacaaagttcaccatctataacaacatgttctgtgctggcttccatgaaggaggtagagattcatgtcaaggagatagtgggggaccccatgttactgaagtggaagggaccagtttcttaactggaattattagctggggtgaagagtgtgcaatgaaaggcaaatatggaatatataccaaggtgtcccggtatgtcaactggattaaggaaaaaacaaagctcactggaggaggatccggaggaggatccttgaacgacatttttgaagcgcaaaaaattgaatggcat

SEQ ID NO: 760 - protein, 482 aa, Artificial sequence
  BIIB-FIX-148 Amino Acid Sequence
MQRVNMIMAESPGLITICLLGYLLSAECTVFLDHENANKILNRPKRYNSGKLEEFVQGNLERECMEEKCSFEEAREVFENTERTTEFWKQYVDGDQCESNPCLNGGSCKDDINSYECWCPFGFEGKNCELDVTCNIKNGRCEQFCKNSADNKVVCSCTEGYRLAENQKSCEPAVPFPCGRVSVSQTSKLTRAETVFPDVDYVNSTEAETILDNITQSTQSFNDFTAVVGGEDAKPGQFPWQVVLNGKVDAFCGGSIVNEKWIVTAAHCVETGVKITVVAGEHNIEETEHTEQKRNVIRIIPHHNYNAAINKYNHDIALLELDEPLVLNSYVTPICIADKEYTNIFLKFGSGYVSGWGRVFHKGRSALVLQYLRVPLVDRATCLRSTKFTIYNNMFCAGFHEGGRDSCQGDSGGPHVTEVEGTSFLTGIISWGEECAMKGKYGIYTKVSRYVNWIKEKTKLTGGGSGGGSLNDIFEAQKIEWH

SEQ ID NO: 761 - DNA, 1308 bp, Artificial sequence
  BIIB-FIX-148 Nucleic Acid Sequence
tataattcaggtaaattggaagagtttgttcaagggaatctagagagagaatgtatggaagaaaagtgtagttttgaagaagcacgagaagtttttgaaaacactgaaagaacaactgaattttggaagcagtatgttgatggagatcagtgtgagtccaatccatgtttaaatggcggcagttgcaaggatgacattaattcctatgaatgttggtgtccctttggatttgaaggaaagaactgtgaattagatgtaacatgtaacattaagaatggcagatgcgagcagttttgtaaaaatagtgctgataacaaggtggtttgctcctgtactgagggatatcgacttgcagaaaaccagaagtcctgtgaaccagcagtgccatttccatgtggaagagtttctgtttcacaaacttctaagctcacccgtgctgagactgtttttcctgatgtggactatgtaaattctactgaagctgaaaccattttggataacatcactcaaagcacccaatcatttaatgacttcactgcagttgttggtggagaagatgccaaaccaggtcaattcccttggcaggttgttttgaatggtaaagttgatgcattctgtggaggctctatcgttaatgaaaaatggattgtaactgctgcccactgtgttgaaactggtgttaaaattacagttgtcgcaggtgaacataatattgaggagacagaacatacagagcaaaagcgaaatgtgattcgaattattcctcaccacaactacaatgcagctattaataagtacaaccatgacattgcccttctggaactggacgaacccttagtgctaaacagctacgttacacctatttgcattgctgacaaggaatacacgaacatcttcctcaaatttggatctggctatgtaagtggctggggaagagtcttccacaaagggagatcagctttagttcttcagtaccttagagttccacttgttgaccgagccacatgtcttcgatctacaaagttcaccatctataacaacatgttctgtgctggcttccatgaaggaggtagagattcatgtcaaggagatagtgggggaccccatgttactgaagtggaagggaccagtttcttaactggaattattagctggggtgaagagtgtgcaatgaaaggcaaatatggaatatataccaaggtgtcccggtatgtcaactggattaaggaaaaaacaaagctcactggaggaggatccggaggaggatccttgaacgacatttttgaagcgcaaaaaattgaatggcat

SEQ ID NO: 762 - protein, 469 aa, Artificial sequence
  BIIB-FX-015 Amino Acid Sequence
ANSFLEEMKKGHLERECMEETCSYEEAREVFEDSDKTNEFWNKYKDGDQCETSPCQNQGKCKDGLGEYTCTCLEGFEGKNCELFTRKLCSLDNGDCDQFCHEEQNSVVCSCARGYTLADNGKACIPTGPYPCGKQTLERRKRSVAQATSSSGEAPDSITWKPYDAADLDPTENPFDLLDFNQTQPERGDNNLTAIVGGQECKDGECPWQALLINEENEGFCGGTILSEFYILTAAHCLYQAKRFKVRVGDRNTEQEEGGEAVHEVEVVIKHNRFTKETYDFDIAVLRLKTPITFRMNVAPACLPERDWAESTLMTQKTGIVSGFGRTHEKGRQSTRLKMLEVPYVDRNSCKLSSSFIITQNMFCAGYDTKQEDACQGDSGGPHVTRFKDTYFVTGIVSWGEGCARKGKYGIYTKVTAFLKWIDRSMKTRGLPKAKSHAPEVITSSPLKGGGSGGGSLNDIFEAQKIEWH

SEQ ID NO: 763 - DNA, 1407 bp, Artificial sequence
  BIIB-FX-015 Nucleic Acid Sequence
gccaattcctttcttgaagagatgaagaaaggacacctcgaaagagagtgcatggaagagacctgctcatacgaagaggcccgcgaggtctttgaggacagcgacaagacgaatgaattctggaataaatacaaagatggcgaccagtgtgagaccagtccttgccagaaccagggcaaatgtaaagacggcctcggggaatacacctgcacctgtttagaaggattcgaaggcaaaaactgtgaattattcacacggaagctctgcagcctggacaacggggactgtgaccagttctgccacgaggaacagaactctgtggtgtgctcctgcgcccgcgggtacaccctggctgacaacggcaaggcctgcattcccacagggccctacccctgtgggaaacagaccctggaacgcaggaagaggtcagtggcccaggccaccagcagcagcggggaggcccctgacagcatcacatggaagccatatgatgcagccgacctggaccccaccgagaaccccttcgacctgcttgacttcaaccagacgcagcctgagaggggcgacaacaacctcaccgcgatcgtgggaggccaggaatgcaaggacggggagtgtccctggcaggccctgctcatcaatgaggaaaacgagggtttctgtggtggaaccattctgagcgagttctacatcctaacggcagcccactgtctctaccaagccaagagattcaaggtgagggtaggggaccggaacacggagcaggaggagggcggtgaggcggtgcacgaggtggaggtggtcatcaagcacaaccggttcacaaaggagacctatgacttcgacatcgccgtgctccggctcaagacccccatcaccttccgcatgaacgtggcgcctgcctgcctccccgagcgtgactgggccgagtccacgctgatgacgcagaagacggggattgtgagcggcttcgggcgcacccacgagaagggccggcagtccaccaggctcaagatgctggaggtgccctacgtggaccgcaacagctgcaagctgtccagcagcttcatcatcacccagaacatgttctgtgccggctacgacaccaagcaggaggatgcctgccagggggacagcgggggcccgcacgtcacccgcttcaaggacacctacttcgtgacaggcatcgtcagctggggagagggctgtgcccgtaaggggaagtacgggatctacaccaaggtcaccgccttcctcaagtggatcgacaggtccatgaaaaccaggggcttgcccaaggccaagagccatgccccggaggtcataacgtcctctccattaaagggaggaggatccggaggaggatccttgaacgacatttttgaagcgcaaaaaattgaatggcat

SEQ ID NO: 764 - protein, 461 aa, Homo sapiens
MQRVNMIMAESPGLITICLLGYLLSAECTVFLDHENANKILNRPKRYNSGKLEEFVQGNLERECMEEKCSFEEAREVFENTERTTEFWKQYVDGDQCESNPCLNGGSCKDDINSYECWCPFGFEGKNCELDVTCNIKNGRCEQFCKNSADNKVVCSCTEGYRLAENQKSCEPAVPFPCGRVSVSQTSKLTRAETVFPDVDYVNSTEAETILDNITQSTQSFNDFTRVVGGEDAKPGQFPWQVVLNGKVDAFCGGSIVNEKWIVTAAHCVETGVKITVVAGEHNIEETEHTEQKRNVIRIIPHHNYNAAINKYNHDIALLELDEPLVLNSYVTPICIADKEYTNIFLKFGSGYVSGWGRVFHKGRSALVLQYLRVPLVDRATCLRSTKFTIYNNMFCAGFHEGGRDSCQGDSGGPHVTEVEGTSFLTGIISWGEECAMKGKYGIYTKVSRYVNWIKEKTKLT

SEQ ID NO: 765 - protein, 488 aa, Homo sapiens
MGRPLHLVLLSASLAGLLLLGESLFIRREQANNILARVTRANSFLEEMKKGHLERECMEETCSYEEAREVFEDSDKTNEFWNKYKDGDQCETSPCQNQGKCKDGLGEYTCTCLEGFEGKNCELFTRKLCSLDNGDCDQFCHEEQNSVVCSCARGYTLADNGKACIPTGPYPCGKQTLERRKRSVAQATSSSGEAPDSITWKPYDAADLDPTENPFDLLDFNQTQPERGDNNLTRIVGGQECKDGECPWQALLINEENEGFCGGTILSEFYILTAAHCLYQAKRFKVRVGDRNTEQEEGGEAVHEVEVVIKHNRFTKETYDFDIAVLRLKTPITFRMNVAPACLPERDWAESTLMTQKTGIVSGFGRTHEKGRQSTRLKMLEVPYVDRNSCKLSSSFIITQNMFCAGYDTKQEDACQGDSGGPHVTRFKDTYFVTGIVSWGEGCARKGKYGIYTKVTAFLKWIDRSMKTRGLPKAKSHAPEVITSSPLK

SEQ ID NO: 766 - protein, 13 aa, Artificial Sequence
  VH CDR3 of anti-FXz antibody
  MISC_FEATURE (3)..(3): Xaa can be G or L
  MISC_FEATURE (4)..(4): Xaa can be R or G
  MISC_FEATURE (5)..(5): Xaa can be F or Y
  MISC_FEATURE (7)..(7): Xaa can be P or G
  MISC_FEATURE (8)..(8): Xaa can be R or A
  MISC_FEATURE (9)..(9): Xaa can be G or S
  MISC_FEATURE (10)..(10): Xaa can be R or A
  MISC_FEATURE (13)..(13): Xaa can be Y or I
ARXXXRXXXXFDX

SEQ ID NO: 767-799 - skipped (33 entries)

SEQ ID NO: 800 - protein, 9 aa, Artificial Sequence
  BIIB-9-605 VH-CDR1
FTFSSYAMS

SEQ ID NO: 801 - protein, 9 aa, Artificial sequence
  BIIB-9-475 VH-CDR1
GSISSYYWS

SEQ ID NO: 802 - protein, 9 aa, Artificial sequence
  BIIB-9-477 VH-CDR1
FTFSNYAMS

SEQ ID NO: 803 - protein, 9 aa, Artificial sequence
  BIIB-9-479 VH-CDR1
GSISSYYWS

SEQ ID NO: 804 - protein, 10 aa, Artificial sequence
  BIIB-9-480 VH-CDR1
YSISSGYYWG

SEQ ID NO: 805 - protein, 9 aa, Artificial sequence
  BIIB-9-558 VH-CDR1
FTFSSYSMN

SEQ ID NO: 806 - protein, 9 aa, Artificial sequence
  BIIB-9-414 VH-CDR1
YTFTSYYMH

SEQ ID NO: 807 - protein, 9 aa, Artificial sequence
  BIIB-9-415 VH-CDR1
YTFTSYYMH

SEQ ID NO: 808 - protein, 9 aa, Artificial sequence
  BIIB-9-425 VH-CDR1
YTFTSYYMH

SEQ ID NO: 809 - protein, 11 aa, Artificial sequence
  BIIB-9-440 VH-CDR1
GSISSSDYYWG

SEQ ID NO: 810 - protein, 9 aa, Artificial sequence
  BIIB-9-452 VH-CDR1
YTFTSYYMH

SEQ ID NO: 811 - protein, 9 aa, Artificial sequence
  BIIB-9-460 VH-CDR1
YTFTSYYMH

SEQ ID NO: 812 - protein, 9 aa, Artificial sequence
  BIIB-9-461 VH-CDR1
YTFTSYYMH

SEQ ID NO: 813 - protein, 9 aa, Artificial sequence
  BIIB-9-465 VH-CDR1
YTFTSYYMV

SEQ ID NO: 814 - protein, 10 aa, Artificial sequence
  BIIB-9-564 VH-CDR1
YSISSGYYWA

SEQ ID NO: 815 - protein, 9 aa, Artificial sequence
  BIIB-9-484 VH-CDR1
FTFSSYSMN

SEQ ID NO: 816 - protein, 9 aa, Artificial sequence
  BIIB-9-469 VH-CDR1
YTFTSYYMH

SEQ ID NO: 817 - protein, 9 aa, Artificial sequence
  BIIB-9-566 VH-CDR1
YTFTSYYMV

SEQ ID NO: 818 - protein, 9 aa, Artificial sequence
  BIIB-9-567 VH-CDR1
YTFTSYYMH

SEQ ID NO: 819 - protein, 9 aa, Artificial sequence
  BIIB-9-569 VH-CDR1
YTFTSYYMH

SEQ ID NO: 820 - protein, 9 aa, Artificial sequence
  BIIB-9-588 VH-CDR1
YTFTSYYMH

SEQ ID NO: 821 - protein, 9 aa, Artificial sequence
  BIIB-9-611 VH-CDR1
YTFTSYYMH

SEQ ID NO: 822 - protein, 9 aa, Artificial sequence
  BIIB-9-619 VH-CDR1
YTFTSYYMH

SEQ ID NO: 823 - protein, 9 aa, Artificial sequence
  BIIB-9-626 VH-CDR1
YTFTSYYMH

SEQ ID NO: 824 - protein, 9 aa, Artificial sequence
  BIIB-9-883 VH-CDR1
YTFTSYYMH

SEQ ID NO: 825 - protein, 9 aa, Artificial sequence
  BIIB-9-419 VH-CDR1
YTFTSYYMH

SEQ ID NO: 826 - protein, 11 aa, Artificial sequence
  BIIB-9-451 VH-CDR1
GSISSSSYYWG

SEQ ID NO: 827 - protein, 9 aa, Artificial sequence
  BIIB-9-473 VH-CDR1
FTFSSYAMS

SEQ ID NO: 828 - protein, 11 aa, Artificial sequence
  BIIB-9-565 VH-CDR1
GSISSSSYYWG

SEQ ID NO: 829 - protein, 11 aa, Artificial sequence
  BIIB-9-573 VH-CDR1
GSISSSSYYWG

SEQ ID NO: 830 - protein, 9 aa, Artificial sequence
  BIIB-9-579 VH-CDR1
YTFTSYYMV

SEQ ID NO: 831 - protein, 9 aa, Artificial sequence
  BIIB-9-581 VH-CDR1
YTFTSYYMH

SEQ ID NO: 832 - protein, 9 aa, Artificial sequence
  BIIB-9-582 VH-CDR1
YTFTSYYMV

SEQ ID NO: 833 - protein, 11 aa, Artificial sequence
  BIIB-9-585 VH-CDR1
GSISSSDYYWG

SEQ ID NO: 834 - protein, 9 aa, Artificial sequence
  BIIB-9-587 VH-CDR1
YTFTSYYMH

SEQ ID NO: 835 - protein, 9 aa, Artificial sequence
  BIIB-9-590 VH-CDR1
YTFTSYYMH

SEQ ID NO: 836 - protein, 11 aa, Artificial sequence
  BIIB-9-592 VH-CDR1
GSISSNSYYWG

SEQ ID NO: 837 - protein, 9 aa, Artificial sequence
  BIIB-9-606 VH-CDR1
YTFTSYYMH

SEQ ID NO: 838 - protein, 11 aa, Artificial sequence
  BIIB-9-608 VH-CDR1
GSISSSSYYWG

SEQ ID NO: 839 - protein, 9 aa, Artificial sequence
  BIIB-9-616 VH-CDR1
YTFTSYYMH

SEQ ID NO: 840 - protein, 11 aa, Artificial sequence
  BIIB-9-621 VH-CDR1
GSISSSSYYWG

SEQ ID NO: 841 - protein, 9 aa, Artificial sequence
  BIIB-9-622 VH-CDR1
YTFTSYYMH

SEQ ID NO: 842 - protein, 9 aa, Artificial sequence
  BIIB-9-627 VH-CDR1
YTFTSYYMH

SEQ ID NO: 843 - protein, 9 aa, Artificial sequence
  BIIB-9-1335 VH-CDR1
FTFSSYDMH

SEQ ID NO: 844 - protein, 9 aa, Artificial sequence
  BIIB-9-1336 VH-CDR1
FTFGSYDMN

SEQ ID NO: 845 - protein, 17 aa, Artificial sequence
  BIIB-9-605  VH-CDR2
AISGSGGSTYYADSVKG

SEQ ID NO: 846 - protein, 16 aa, Artificial sequence
  BIIB-9-475 VH-CDR2
SIYYSGSTNYNPSLKS

SEQ ID NO: 847 - protein, 17 aa, Artificial sequence
  BIIB-9-477 VH-CDR2
AISGSGGSTYYADSVKG

SEQ ID NO: 848 - protein, 16 aa, Artificial sequence
  BIIB-9-479 VH-CDR2
SIYYSGSTNYNPSLKS

SEQ ID NO: 849 - protein, 16 aa, Artificial sequence
  BIIB-9-480 VH-CDR2
SSYHSGSTYYNPSLKS

SEQ ID NO: 850 - protein, 17 aa, Artificial sequence
  BIIB-9-558 VH-CDR2
SISSSSSYIYYADSVKG

SEQ ID NO: 851 - protein, 17 aa, Artificial sequence
  BIIB-9-414 VH-CDR2
IINPSGGSTSYAQKFQG

SEQ ID NO: 852 - protein, 17 aa, Artificial sequence
  BIIB-9-415 VH-CDR2
IINPSGGSTSYAQKFQG

SEQ ID NO: 853 - protein, 17 aa, Artificial sequence
  BIIB-9-425 VH-CDR2
IINPSGGSTSYAQKFQG

SEQ ID NO: 854 - protein, 16 aa, Artificial sequence
  BIIB-9-440 VH-CDR2
SIYYSGSTYYNPSLKS

SEQ ID NO: 855 - protein, 17 aa, Artificial sequence
  BIIB-9-452 VH-CDR2
IINPSGGSTSYAQKFQG

SEQ ID NO: 856 - protein, 17 aa, Artificial sequence
  BIIB-9-460 VH-CDR2
IINPSGGSTSYAQKFQG

SEQ ID NO: 857 - protein, 17 aa, Artificial sequence
  BIIB-9-461 VH-CDR2
IINPSGGSTSYAQKFQG

SEQ ID NO: 858 - protein, 17 aa, Artificial sequence
  BIIB-9-465 VH-CDR2
IINPSGGSTSYAQKFQG

SEQ ID NO: 859 - protein, 16 aa, Artificial sequence
  BIIB-9-564 VH-CDR2
SIYHSGSTYYNPSLKS

SEQ ID NO: 860 - protein, 17 aa, Artificial sequence
  BIIB-9-484 VH-CDR2
SISSSSSYIYYADSVKG

SEQ ID NO: 861 - protein, 17 aa, Artificial sequence
  BIIB-9-469 VH-CDR2
IINPSGGSTSYAQKFQG

SEQ ID NO: 862 - protein, 17 aa, Artificial sequence
  BIIB-9-566 VH-CDR2
IINPSGGSTSYAQKFQG

SEQ ID NO: 863 - protein, 17 aa, Artificial sequence
  BIIB-9-567 VH-CDR2
IINPSGGSTSYAQKFQG

SEQ ID NO: 864 - protein, 17 aa, Artificial sequence
  BIIB-9-569 VH-CDR2
IINPSGGSTSYAQKFQG

SEQ ID NO: 865 - protein, 17 aa, Artificial sequence
  BIIB-9-588 VH-CDR2
IINPSGGSTTYAQKFQG

SEQ ID NO: 866 - protein, 17 aa, Artificial sequence
  BIIB-9-611 VH-CDR2
IINPSGGSTSYAQKFQG

SEQ ID NO: 867 - protein, 17 aa, Artificial sequence
  BIIB-9-619 VH-CDR2
IINPSGGSTSYAQKFQG

SEQ ID NO: 868 - protein, 17 aa, Artificial sequence
  BIIB-9-626 VH-CDR2
VINPSGGSTSYAQKFQG

SEQ ID NO: 869 - protein, 17 aa, Artificial sequence
  BIIB-9-883 VH-CDR2
IINPSGGSTSYAQKFQG

SEQ ID NO: 870 - protein, 17 aa, Artificial sequence
  BIIB-9-419 VH-CDR2
IINPSGGSTSYAQKFQG

SEQ ID NO: 871 - protein, 16 aa, Artificial sequence
  BIIB-9-451 VH-CDR2
SISYSGSTYYNPSLKS

SEQ ID NO: 872 - protein, 17 aa, Artificial sequence
  BIIB-9-473 VH-CDR2
AISGSGGSTYYADSVKG

SEQ ID NO: 873 - protein, 16 aa, Artificial sequence
  BIIB-9-565 VH-CDR2
SIYYSGSTYYNPSLKS

SEQ ID NO: 874 - protein, 16 aa, Artificial sequence
  BIIB-9-573 VH-CDR2
SIYYSGSTYYNPSLKS

SEQ ID NO: 875 - protein, 17 aa, Artificial sequence
  BIIB-9-579 VH-CDR2
IINPSGGSTSYAQKFQG

SEQ ID NO: 876 - protein, 17 aa, Artificial sequence
  BIIB-9-581 VH-CDR2
IINPSGGSTSYAQKFQG

SEQ ID NO: 877 - protein, 17 aa, Artificial sequence
  BIIB-9-582 VH-CDR2
IINPSGGSTSYAQKFQG

SEQ ID NO: 878 - protein, 16 aa, Artificial sequence
  BIIB-9-585 VH-CDR2
SIYYSGSTYYNPSLKS

SEQ ID NO: 879 - protein, 17 aa, Artificial sequence
  BIIB-9-587 VH-CDR2
IINPSGGSTSYAQKFQG

SEQ ID NO: 880 - protein, 17 aa, Artificial sequence
  BIIB-9-590 VH-CDR2
IINPSGGSTSYAQKFQG

SEQ ID NO: 881 - protein, 16 aa, Artificial sequence
  BIIB-9-592 VH-CDR2
SIYYSGSTYYNPSLKS

SEQ ID NO: 882 - protein, 17 aa, Artificial sequence
  BIIB-9-606 VH-CDR2
IINPSGGSTSYAQKFQG

SEQ ID NO: 883 - protein, 16 aa, Artificial sequence
  BIIB-9-608 VH-CDR2
SIYYSGSTYYNPSLKS

SEQ ID NO: 884 - protein, 17 aa, Artificial sequence
  BIIB-9-616 VH-CDR2
IINPSGGSTSYAQKFQG

SEQ ID NO: 885 - protein, 16 aa, Artificial sequence
  BIIB-9-621 VH-CDR2
SIYYSGSTYYNPSLKS

SEQ ID NO: 886 - protein, 17 aa, Artificial sequence
  BIIB-9-622 VH-CDR2
IINPSGGSTSYAQKFQG

SEQ ID NO: 887 - protein, 17 aa, Artificial sequence
  BIIB-9-627 VH-CDR2
IINPSGGSTSYAQKFQG

SEQ ID NO: 888 - protein, 17 aa, Artificial sequence
  BIIB-9-1335 VH-CDR2
SISSGSSYIYYADSVKG

SEQ ID NO: 889 - protein, 17 aa, Artificial sequence
  BIIB-9-1336 VH-CDR2
SISSGESYIYYAESVKG

SEQ ID NO: 890 - protein, 12 aa, Artificial sequence
  BIIB-9-605  VH-CDR3
AKKRKYYGSHNP

SEQ ID NO: 891 - protein, 16 aa, Artificial sequence
  BIIB-9-475 VH-CDR3
ARDVGGYDYGVGAFDI

SEQ ID NO: 892 - protein, 13 aa, Artificial sequence
  BIIB-9-477 VH-CDR3
ARGGVYSSSWMRF

SEQ ID NO: 893 - protein, 13 aa, Artificial sequence
  BIIB-9-479 VH-CDR3
AREHYGDYPLFDI

SEQ ID NO: 894 - protein, 12 aa, Artificial sequence
  BIIB-9-480 VH-CDR3
ARDQQDYGAFDI

SEQ ID NO: 895 - protein, 13 aa, Artificial sequence
  BIIB-9-558 VH-CDR3
ARSYGYGYHDFDL

SEQ ID NO: 896 - protein, 14 aa, Artificial sequence
  BIIB-9-414 VH-CDR3
ARDPYSYGMYYFDY

SEQ ID NO: 897 - protein, 13 aa, Artificial sequence
  BIIB-9-415 VH-CDR3
ARDGLSSGYYWDN

SEQ ID NO: 898 - protein, 12 aa, Artificial sequence
  BIIB-9-425 VH-CDR3
AREPTWDVAYDY

SEQ ID NO: 899 - protein, 16 aa, Artificial sequence
  BIIB-9-440 VH-CDR3
ARSPRHKVRGPNWFDP

SEQ ID NO: 900 - protein, 12 aa, Artificial sequence
  BIIB-9-452 VH-CDR3
ARDGRLSYTWDR

SEQ ID NO: 901 - protein, 18 aa, Artificial sequence
  BIIB-9-460 VH-CDR3
ARDISTDGESSLYYYMDV

SEQ ID NO: 902 - protein, 15 aa, Artificial sequence
  BIIB-9-461 VH-CDR3
ARGPTDSSGYLDMDV

SEQ ID NO: 903 - protein, 12 aa, Artificial sequence
  BIIB-9-465 VH-CDR3
ARSPTDGYYFDL

SEQ ID NO: 904 - protein, 13 aa, Artificial sequence
  BIIB-9-564 VH-CDR3
ARDPGYSWEYFDY

SEQ ID NO: 905 - protein, 15 aa, Artificial sequence
  BIIB-9-484 VH-CDR3
ARDVGGYAGYYGMDV

SEQ ID NO: 906 - protein, 14 aa, Artificial sequence
  BIIB-9-469 VH-CDR3
ARDLGYGRSYDFDL

SEQ ID NO: 907 - protein, 15 aa, Artificial sequence
  BIIB-9-566 VH-CDR3
ARVPTYRYSYLAFDI

SEQ ID NO: 908 - protein, 15 aa, Artificial sequence
  BIIB-9-567 VH-CDR3
ARLGRRYYAYDGMDV

SEQ ID NO: 909 - protein, 14 aa, Artificial sequence
  BIIB-9-569 VH-CDR3
ARDGSGYSPYSFDP

SEQ ID NO: 910 - protein, 18 aa, Artificial sequence
  BIIB-9-588 VH-CDR3
ARDGGGSYDYWSGYWYDV

SEQ ID NO: 911 - protein, 13 aa, Artificial sequence
  BIIB-9-611 VH-CDR3
AREVISRVSYFDL

SEQ ID NO: 912 - protein, 14 aa, Artificial sequence
  BIIB-9-619 VH-CDR3
ARDGPRVSDYYMDV

SEQ ID NO: 913 - protein, 13 aa, Artificial sequence
  BIIB-9-626 VH-CDR3
ARDLQYSMTYFDY

SEQ ID NO: 914 - protein, 12 aa, Artificial sequence
  BIIB-9-883 VH-CDR3
ARDGRLSYTWDR

SEQ ID NO: 915 - protein, 13 aa, Artificial sequence
  BIIB-9-419 VH-CDR3
AREPTFYASYFDL

SEQ ID NO: 916 - protein, 14 aa, Artificial sequence
  BIIB-9-451 VH-CDR3
ARDSGGYYYQGFDY

SEQ ID NO: 917 - protein, 16 aa, Artificial sequence
  BIIB-9-473 VH-CDR3
AKDRLRYSRWYDGMDV

SEQ ID NO: 918 - protein, 15 aa, Artificial sequence
  BIIB-9-565 VH-CDR3
ARAGMYSSYANWFDP

SEQ ID NO: 919 - protein, 12 aa, Artificial sequence
  BIIB-9-573 VH-CDR3
ARESKTKGYLDL

SEQ ID NO: 920 - protein, 13 aa, Artificial sequence
  BIIB-9-579 VH-CDR3
ARGPWYSYYYMDV

SEQ ID NO: 921 - protein, 15 aa, Artificial sequence
  BIIB-9-581 VH-CDR3
ARDPLYYREGYVFDY

SEQ ID NO: 922 - protein, 14 aa, Artificial sequence
  BIIB-9-582 VH-CDR3
ARAPTYFYSYGMDV

SEQ ID NO: 923 - protein, 17 aa, Artificial sequence
  BIIB-9-585 VH-CDR3
AREVGTYYYGLDFWFDP

SEQ ID NO: 924 - protein, 13 aa, Artificial sequence
  BIIB-9-587 VH-CDR3
ARGPPGYEYYMDV

SEQ ID NO: 925 - protein, 13 aa, Artificial sequence
  BIIB-9-590 VH-CDR3
ARDQEWAYYGMDV

SEQ ID NO: 926 - protein, 20 aa, Artificial sequence
  BIIB-9-592 VH-CDR3
ARDSNYDSSGYALYYYGMDV

SEQ ID NO: 927 - protein, 14 aa, Artificial sequence
  BIIB-9-606 VH-CDR3
ARTKWSSSPYGMDV

SEQ ID NO: 928 - protein, 14 aa, Artificial sequence
  BIIB-9-608 VH-CDR3
ARDRLETSEAGMDV

SEQ ID NO: 929 - protein, 11 aa, Artificial sequence
  BIIB-9-616 VH-CDR3
ARGGSKYFFDL

SEQ ID NO: 930 - protein, 13 aa, Artificial sequence
  BIIB-9-621 VH-CDR3
ARDGSISGSRFDY

SEQ ID NO: 931 - protein, 15 aa, Artificial sequence
  BIIB-9-622 VH-CDR3
ARDGATTVSYLSFDI

SEQ ID NO: 932 - protein, 18 aa, Artificial sequence
  BIIB-9-627 VH-CDR3
ARADYDYWSGYGGLGMDV

SEQ ID NO: 933 - protein, 15 aa, Artificial sequence
  BIIB-9-1335 VH-CDR3
ARDVGGYAGYYGMDV

SEQ ID NO: 934 - protein, 15 aa, Artificial sequence
  BIIB-9-1336 VH-CDR3
ARDVGGYAGYYGMDV

SEQ ID NO: 935 - protein, 11 aa, Artificial sequence
  BIIB-9-605  VL-CDR1
RASQGISSWLA

SEQ ID NO: 936 - protein, 11 aa, Artificial sequence
  BIIB-9-475 VL-CDR1
QASQDITNYLN

SEQ ID NO: 937 - protein, 11 aa, Artificial sequence
  BIIB-9-477 VL-CDR1
RASQSVSSSLA

SEQ ID NO: 938 - protein, 11 aa, Artificial sequence
  BIIB-9-479 VL-CDR1
RASQSISSWLA

SEQ ID NO: 939 - protein, 16 aa, Artificial sequence
  BIIB-9-480 VL-CDR1
RSSQSLLYSNGYNYLD

SEQ ID NO: 940 - protein, 11 aa, Artificial sequence
  BIIB-9-558 VL-CDR1
RASQSIGSWLA

SEQ ID NO: 941 - protein, 11 aa, Artificial sequence
  BIIB-9-414 VL-CDR1
RASQGISSWLA

SEQ ID NO: 942 - protein, 11 aa, Artificial sequence
  BIIB-9-415 VL-CDR1
RASQGIDSWLA

SEQ ID NO: 943 - protein, 12 aa, Artificial sequence
  BIIB-9-425 VL-CDR1
RASQSVSSDYLA

SEQ ID NO: 944 - protein, 17 aa, Artificial sequence
  BIIB-9-440 VL-CDR1
KSSQSVLYSSNNKNYLA

SEQ ID NO: 945 - protein, 11 aa, Artificial sequence
  BIIB-9-452 VL-CDR1
RASQSVSSNLA

SEQ ID NO: 946 - protein, 11 aa, Artificial sequence
  BIIB-9-460 VL-CDR1
RASQSVSSNLA

SEQ ID NO: 947 - protein, 11 aa, Artificial sequence
  BIIB-9-461 VL-CDR1
RASQSVSSSLA

SEQ ID NO: 948 - protein, 11 aa, Artificial sequence
  BIIB-9-465 VL-CDR1
RASQSINSWLA

SEQ ID NO: 949 - protein, 11 aa, Artificial sequence
  BIIB-9-564 VL-CDR1
RASQSISSYLN

SEQ ID NO: 950 - protein, 11 aa, Artificial sequence
  BIIB-9-484 VL-CDR1
QASQDIANYLN

SEQ ID NO: 951 - protein, 11 aa, Artificial sequence
  BIIB-9-469 VL-CDR1
RASQSVSSNLA

SEQ ID NO: 952 - protein, 11 aa, Artificial sequence
  BIIB-9-566 VL-CDR1
RASQSVSSSLA

SEQ ID NO: 953 - protein, 11 aa, Artificial sequence
  BIIB-9-567 VL-CDR1
RASQSISSWLA

SEQ ID NO: 954 - protein, 11 aa, Artificial sequence
  BIIB-9-569 VL-CDR1
QASQDISNYLN

SEQ ID NO: 955 - protein, 11 aa, Artificial sequence
  BIIB-9-588 VL-CDR1
RASQSVSSNLA

SEQ ID NO: 956 - protein, 11 aa, Artificial sequence
  BIIB-9-611 VL-CDR1
RASQSVSSNLA

SEQ ID NO: 957 - protein, 11 aa, Artificial sequence
  BIIB-9-619 VL-CDR1
RASQSVSSYLA

SEQ ID NO: 958 - protein, 11 aa, Artificial sequence
  BIIB-9-626 VL-CDR1
RASQSISSWLA

SEQ ID NO: 959 - protein, 11 aa, Artificial sequence
  BIIB-9-883 VL-CDR1
QASQDITNYLN

SEQ ID NO: 960 - protein, 11 aa, Artificial sequence
  BIIB-9-419 VL-CDR1
RASQSVSSYLA

SEQ ID NO: 961 - protein, 17 aa, Artificial sequence
  BIIB-9-451 VL-CDR1
KSSQSVLYSSNNKNYLA

SEQ ID NO: 962 - protein, 11 aa, Artificial sequence
  BIIB-9-473 VL-CDR1
RASQSVSSYLA

SEQ ID NO: 963 - protein, 11 aa, Artificial sequence
  BIIB-9-565 VL-CDR1
RASQSVSSYLA

SEQ ID NO: 964 - protein, 12 aa, Artificial sequence
  BIIB-9-573 VL-CDR1
RASQSVSSSFLA

SEQ ID NO: 965 - protein, 11 aa, Artificial sequence
  BIIB-9-579 VL-CDR1
RASQSISSYLN

SEQ ID NO: 966 - protein, 11 aa, Artificial sequence
  BIIB-9-581 VL-CDR1
RASQSISSYLN

SEQ ID NO: 967 - protein, 11 aa, Artificial sequence
  BIIB-9-582 VL-CDR1
QASQDISNYLN

SEQ ID NO: 968 - protein, 11 aa, Artificial sequence
  BIIB-9-585 VL-CDR1
RASQGISSWLA

SEQ ID NO: 969 - protein, 11 aa, Artificial sequence
  BIIB-9-587 VL-CDR1
RASQGISSWLA

SEQ ID NO: 970 - protein, 11 aa, Artificial sequence
  BIIB-9-590 VL-CDR1
RASQSVSSYLA

SEQ ID NO: 971 - protein, 11 aa, Artificial sequence
  BIIB-9-592 VL-CDR1
RASQSISSYLN

SEQ ID NO: 972 - protein, 11 aa, Artificial sequence
  BIIB-9-606 VL-CDR1
QASQDISNYLN

SEQ ID NO: 973 - protein, 17 aa, Artificial sequence
  BIIB-9-608 VL-CDR1
KSSQSVLYSSNNKNYLA

SEQ ID NO: 974 - protein, 11 aa, Artificial sequence
  BIIB-9-616 VL-CDR1
RASQSVSSSLA

SEQ ID NO: 975 - protein, 17 aa, Artificial sequence
  BIIB-9-621 VL-CDR1
KSSQSVLYSSNNKNYLA

SEQ ID NO: 976 - protein, 11 aa, Artificial sequence
  BIIB-9-622 VL-CDR1
RASQSVSSSLA

SEQ ID NO: 977 - protein, 16 aa, Artificial sequence
  BIIB-9-627 VL-CDR1
RSSQSLLHSNGYNYLD

SEQ ID NO: 978 - protein, 11 aa, Artificial sequence
  BIIB-9-1335 VL-CDR1
QASQDIANYLN

SEQ ID NO: 979 - protein, 11 aa, Artificial sequence
  BIIB-9-1336 VL-CDR1
QASQDIANYLN

SEQ ID NO: 980 - protein, 7 aa, Artificial sequence
  BIIB-9-605  VL-CDR2
AASSLQS

SEQ ID NO: 981 - protein, 7 aa, Artificial sequence
  BIIB-9-475 VL-CDR2
DASNLET

SEQ ID NO: 982 - protein, 7 aa, Artificial sequence
  BIIB-9-477 VL-CDR2
GASTRAT

SEQ ID NO: 983 - protein, 7 aa, Artificial sequence
  BIIB-9-479 VL-CDR2
KASSLES

SEQ ID NO: 984 - protein, 7 aa, Artificial sequence
  BIIB-9-480 VL-CDR2
LGSNRAS

SEQ ID NO: 985 - protein, 7 aa, Artificial sequence
  BIIB-9-558 VL-CDR2
KASSLES

SEQ ID NO: 986 - protein, 7 aa, Artificial sequence
  BIIB-9-414 VL-CDR2
AASSLQS

SEQ ID NO: 987 - protein, 7 aa, Artificial sequence
  BIIB-9-415 VL-CDR2
AASSLQS

SEQ ID NO: 988 - protein, 7 aa, Artificial sequence
  BIIB-9-425 VL-CDR2
GASSRAT

SEQ ID NO: 989 - protein, 7 aa, Artificial sequence
  BIIB-9-440 VL-CDR2
WASTRES

SEQ ID NO: 990 - protein, 7 aa, Artificial sequence
  BIIB-9-452 VL-CDR2
GASTRAT

SEQ ID NO: 991 - protein, 7 aa, Artificial sequence
  BIIB-9-460 VL-CDR2
GASTRAT

SEQ ID NO: 992 - protein, 7 aa, Artificial sequence
  BIIB-9-461 VL-CDR2
GASTRAT

SEQ ID NO: 993 - protein, 7 aa, Artificial sequence
  BIIB-9-465 VL-CDR2
DASSLES

SEQ ID NO: 994 - protein, 7 aa, Artificial sequence
  BIIB-9-564 VL-CDR2
AASSLQS

SEQ ID NO: 995 - protein, 7 aa, Artificial sequence
  BIIB-9-484 VL-CDR2
DASNLET

SEQ ID NO: 996 - protein, 7 aa, Artificial sequence
  BIIB-9-469 VL-CDR2
GASTRAT

SEQ ID NO: 997 - protein, 7 aa, Artificial sequence
  BIIB-9-566 VL-CDR2
GASTRAT

SEQ ID NO: 998 - protein, 7 aa, Artificial sequence
  BIIB-9-567 VL-CDR2
DASSLES

SEQ ID NO: 999 - protein, 7 aa, Artificial sequence
  BIIB-9-569 VL-CDR2
DASNLAT

SEQ ID NO: 1000 - protein, 7 aa, Artificial sequence
  BIIB-9-588 VL-CDR2
GASTRAT

SEQ ID NO: 1001 - protein, 7 aa, Artificial sequence
  BIIB-9-611 VL-CDR2
GASTRAT

SEQ ID NO: 1002 - protein, 7 aa, Artificial sequence
  BIIB-9-619 VL-CDR2
DASNRAT

SEQ ID NO: 1003 - protein, 7 aa, Artificial sequence
  BIIB-9-626 VL-CDR2
KASSLES

SEQ ID NO: 1004 - protein, 7 aa, Artificial sequence
  BIIB-9-883 VL-CDR2
DASNLET

SEQ ID NO: 1005 - protein, 7 aa, Artificial sequence
  BIIB-9-419 VL-CDR2
DSSNRAT

SEQ ID NO: 1006 - protein, 7 aa, Artificial sequence
  BIIB-9-451 VL-CDR2
WASTRES

SEQ ID NO: 1007 - protein, 7 aa, Artificial sequence
  BIIB-9-473 VL-CDR2
DASNRAT

SEQ ID NO: 1008 - protein, 7 aa, Artificial sequence
  BIIB-9-565 VL-CDR2
DASNRAT

SEQ ID NO: 1009 - protein, 7 aa, Artificial sequence
  BIIB-9-573 VL-CDR2
GASSRAT

SEQ ID NO: 1010 - protein, 7 aa, Artificial sequence
  BIIB-9-579 VL-CDR2
GASSLQS

SEQ ID NO: 1011 - protein, 7 aa, Artificial sequence
  BIIB-9-581 VL-CDR2
AASSLQS

SEQ ID NO: 1012 - protein, 7 aa, Artificial sequence
  BIIB-9-582 VL-CDR2
DASNLET

SEQ ID NO: 1013 - protein, 7 aa, Artificial sequence
  BIIB-9-585 VL-CDR2
AASSLQS

SEQ ID NO: 1014 - protein, 7 aa, Artificial sequence
  BIIB-9-587 VL-CDR2
AASSLQS

SEQ ID NO: 1015 - protein, 7 aa, Artificial sequence
  BIIB-9-590 VL-CDR2
DASNRAT

SEQ ID NO: 1016 - protein, 7 aa, Artificial sequence
  BIIB-9-592 VL-CDR2
AASSLQS

SEQ ID NO: 1017 - protein, 7 aa, Artificial sequence
  BIIB-9-606 VL-CDR2
DASNLET

SEQ ID NO: 1018 - protein, 7 aa, Artificial sequence
  BIIB-9-608 VL-CDR2
WASTRES

SEQ ID NO: 1019 - protein, 7 aa, Artificial sequence
  BIIB-9-616 VL-CDR2
GASTRAT

SEQ ID NO: 1020 - protein, 7 aa, Artificial sequence
  BIIB-9-621 VL-CDR2
WASTRES

SEQ ID NO: 1021 - protein, 7 aa, Artificial sequence
  BIIB-9-622 VL-CDR2
GASTRAT

SEQ ID NO: 1022 - protein, 7 aa, Artificial sequence
  BIIB-9-627 VL-CDR2
LGSNRAS

SEQ ID NO: 1023 - protein, 7 aa, Artificial sequence
  BIIB-9-1335 VL-CDR2
DASNLET

SEQ ID NO: 1024 - protein, 7 aa, Artificial sequence
  BIIB-9-1336 VL-CDR2
DASNLET

SEQ ID NO: 1025 - protein, 9 aa, Artificial sequence
  BIIB-9-605  VL-CDR3
QQADVFPFT

SEQ ID NO: 1026 - protein, 9 aa, Artificial sequence
  BIIB-9-475 VL-CDR3
QQSSNFPLT

SEQ ID NO: 1027 - protein, 9 aa, Artificial sequence
  BIIB-9-477 VL-CDR3
QQDVNWPIT

SEQ ID NO: 1028 - protein, 9 aa, Artificial sequence
  BIIB-9-479 VL-CDR3
QQYRILSPT

SEQ ID NO: 1029 - protein, 9 aa, Artificial sequence
  BIIB-9-480 VL-CDR3
MQARQPPWT

SEQ ID NO: 1030 - protein, 9 aa, Artificial sequence
  BIIB-9-558 VL-CDR3
QQAGSYSFT

SEQ ID NO: 1031 - protein, 9 aa, Artificial sequence
  BIIB-9-414 VL-CDR3
QQGDVFPFT

SEQ ID NO: 1032 - protein, 9 aa, Artificial sequence
  BIIB-9-415 VL-CDR3
QQGDAFPFT

SEQ ID NO: 1033 - protein, 9 aa, Artificial sequence
  BIIB-9-425 VL-CDR3
QQYDSHPYT

SEQ ID NO: 1034 - protein, 9 aa, Artificial sequence
  BIIB-9-440 VL-CDR3
QQYALDPPT

SEQ ID NO: 1035 - protein, 9 aa, Artificial sequence
  BIIB-9-452 VL-CDR3
QQANNFPFT

SEQ ID NO: 1036 - protein, 9 aa, Artificial sequence
  BIIB-9-460 VL-CDR3
QQHDNFPFT

SEQ ID NO: 1037 - protein, 9 aa, Artificial sequence
  BIIB-9-461 VL-CDR3
QQHHHWPPT

SEQ ID NO: 1038 - protein, 9 aa, Artificial sequence
  BIIB-9-465 VL-CDR3
QQYEIFPFT

SEQ ID NO: 1039 - protein, 9 aa, Artificial sequence
  BIIB-9-564 VL-CDR3
QQSVAVPPT

SEQ ID NO: 1040 - protein, 9 aa, Artificial sequence
  BIIB-9-484 VL-CDR3
QQYANFPYT

SEQ ID NO: 1041 - protein, 9 aa, Artificial sequence
  BIIB-9-469 VL-CDR3
QQSNNFPFT

SEQ ID NO: 1042 - protein, 9 aa, Artificial sequence
  BIIB-9-566 VL-CDR3
QQHDNWPPT

SEQ ID NO: 1043 - protein, 9 aa, Artificial sequence
  BIIB-9-567 VL-CDR3
QQYRIYSPT

SEQ ID NO: 1044 - protein, 9 aa, Artificial sequence
  BIIB-9-569 VL-CDR3
QQADDFPFT

SEQ ID NO: 1045 - protein, 9 aa, Artificial sequence
  BIIB-9-588 VL-CDR3
QQAYNWPFT

SEQ ID NO: 1046 - protein, 9 aa, Artificial sequence
  BIIB-9-611 VL-CDR3
QQDNIHPYT

SEQ ID NO: 1047 - protein, 9 aa, Artificial sequence
  BIIB-9-619 VL-CDR3
QQRDNWPFT

SEQ ID NO: 1048 - protein, 10 aa, Artificial sequence
  BIIB-9-626 VL-CDR3
QQDGSYPPLT

SEQ ID NO: 1049 - protein, 9 aa, Artificial sequence
  BIIB-9-883 VL-CDR3
QQADHFPFT

SEQ ID NO: 1050 - protein, 9 aa, Artificial sequence
  BIIB-9-419 VL-CDR3
QQVSTHPYT

SEQ ID NO: 1051 - protein, 9 aa, Artificial sequence
  BIIB-9-451 VL-CDR3
QQYYFPPWT

SEQ ID NO: 1052 - protein, 9 aa, Artificial sequence
  BIIB-9-473 VL-CDR3
QQRSFLPYT

SEQ ID NO: 1053 - protein, 9 aa, Artificial sequence
  BIIB-9-565 VL-CDR3
QQDSNLPFT

SEQ ID NO: 1054 - protein, 9 aa, Artificial sequence
  BIIB-9-573 VL-CDR3
QQSHSPPYT

SEQ ID NO: 1055 - protein, 9 aa, Artificial sequence
  BIIB-9-579 VL-CDR3
QQAFSFPFT

SEQ ID NO: 1056 - protein, 9 aa, Artificial sequence
  BIIB-9-581 VL-CDR3
QQSDLFPFT

SEQ ID NO: 1057 - protein, 9 aa, Artificial sequence
  BIIB-9-582 VL-CDR3
QQADILPPT

SEQ ID NO: 1058 - protein, 9 aa, Artificial sequence
  BIIB-9-585 VL-CDR3
QQANSYPIT

SEQ ID NO: 1059 - protein, 9 aa, Artificial sequence
  BIIB-9-587 VL-CDR3
QQADSFPFT

SEQ ID NO: 1060 - protein, 9 aa, Artificial sequence
  BIIB-9-590 VL-CDR3
QQVDNFPLT

SEQ ID NO: 1061 - protein, 9 aa, Artificial sequence
  BIIB-9-592 VL-CDR3
QQPYDTPIT

SEQ ID NO: 1062 - protein, 9 aa, Artificial sequence
  BIIB-9-606 VL-CDR3
QQSDLFPFT

SEQ ID NO: 1063 - protein, 8 aa, Artificial sequence
  BIIB-9-608 VL-CDR3
QQFLYTPT

SEQ ID NO: 1064 - protein, 9 aa, Artificial sequence
  BIIB-9-616 VL-CDR3
QQADNFPFT

SEQ ID NO: 1065 - protein, 9 aa, Artificial sequence
  BIIB-9-621 VL-CDR3
QQFYLPPWT

SEQ ID NO: 1066 - protein, 9 aa, Artificial sequence
  BIIB-9-622 VL-CDR3
QQHSTWPPT

SEQ ID NO: 1067 - protein, 9 aa, Artificial sequence
  BIIB-9-627 VL-CDR3
MQARERPWT

SEQ ID NO: 1068 - protein, 9 aa, Artificial sequence
  BIIB-9-1335 VL-CDR3
QQYANFPYT

SEQ ID NO: 1069 - protein, 9 aa, Artificial sequence
  BIIB-9-1336 VL-CDR3
QQYANFPYT

SEQ ID NO: 1070 - protein, 9 aa, Artificial sequence
  BIIB-9-408 VH-CDR1
YTFTSYYMH

SEQ ID NO: 1071 - protein, 9 aa, Artificial sequence
  BIIB-9-416 VH-CDR1
YTFTSYYMH

SEQ ID NO: 1072 - protein, 9 aa, Artificial sequence
  BIIB-9-629 VH-CDR1
YTFTSYYMH

SEQ ID NO: 1073 - protein, 9 aa, Artificial sequence
  BIIB-9-885 VH-CDR1
YTFTSYYMH

SEQ ID NO: 1074 - protein, 17 aa, Artificial sequence
  BIIB-9-408 VH-CDR2
IINPSGGSTTYAQKFQG

SEQ ID NO: 1075 - protein, 17 aa, Artificial sequence
  BIIB-9-416 VH-CDR2
IINPSGGSTSYAQKFQG

SEQ ID NO: 1076 - protein, 17 aa, Artificial sequence
  BIIB-9-629 VH-CDR2
VINPSGGSTSYAQKFQG

SEQ ID NO: 1077 - protein, 17 aa, Artificial sequence
  BIIB-9-885 VH-CDR2
IINPSGGSTSYAQKFQG

SEQ ID NO: 1078 - protein, 20 aa, Artificial sequence
  BIIB-9-408 VH-CDR3
ARDPGAYDDWSGYDDYGMDV

SEQ ID NO: 1079 - protein, 18 aa, Artificial sequence
  BIIB-9-416 VH-CDR3
AREGPMLDYPTYSNWFDP

SEQ ID NO: 1080 - protein, 17 aa, Artificial sequence
  BIIB-9-629 VH-CDR3
ARDPSQDYATGTGWFDP

SEQ ID NO: 1081 - protein, 18 aa, Artificial sequence
  BIIB-9-885 VH-CDR3
AREGPMLDYPTYSNWFDP

SEQ ID NO: 1082 - protein, 11 aa, Artificial sequence
  BIIB-9-408 VL-CDR1
RASQSVSSYLA

SEQ ID NO: 1083 - protein, 11 aa, Artificial sequence
  BIIB-9-416 VL-CDR1
RASQSVSSYLA

SEQ ID NO: 1084 - protein, 11 aa, Artificial sequence
  BIIB-9-629 VL-CDR1
QASQDISNYLN

SEQ ID NO: 1085 - protein, 11 aa, Artificial sequence
  BIIB-9-885 VL-CDR1
RASQSVSSYLA

SEQ ID NO: 1086 - protein, 7 aa, Artificial sequence
  BIIB-9-408 VL-CDR2
DASNRAT

SEQ ID NO: 1087 - protein, 7 aa, Artificial sequence
  BIIB-9-416 VL-CDR2
DSSNRAT

SEQ ID NO: 1088 - protein, 7 aa, Artificial sequence
  BIIB-9-629 VL-CDR2
DASNLET

SEQ ID NO: 1089 - protein, 7 aa, Artificial sequence
  BIIB-9-885 VL-CDR2
DASKRAT

SEQ ID NO: 1090 - protein, 10 aa, Artificial sequence
  BIIB-9-408 VL-CDR3
QQAFVWPPIT

SEQ ID NO: 1091 - protein, 9 aa, Artificial sequence
  BIIB-9-416 VL-CDR3
QQRVVWPPT

SEQ ID NO: 1092 - protein, 9 aa, Artificial sequence
  BIIB-9-629 VL-CDR3
QQLDSLPPT

SEQ ID NO: 1093 - protein, 9 aa, Artificial sequence
  BIIB-9-885 VL-CDR3
QQRVIWPPT

SEQ ID NO: 1094 - protein, 11 aa, Artificial sequence
  BIIB-9-607 VH-CDR1
GSISSSSYYWG

SEQ ID NO: 1095 - protein, 11 aa, Artificial sequence
  BIIB-9-471 VH-CDR1
GSISSGGYYWS

SEQ ID NO: 1096 - protein, 9 aa, Artificial sequence
  BIIB-9-472 VH-CDR1
FTFSSYSMN

SEQ ID NO: 1097 - protein, 9 aa, Artificial sequence
  BIIB-9-439 VH-CDR1
YTFTSYYMH

SEQ ID NO: 1098 - protein, 9 aa, Artificial sequence
  BIIB-9-446 VH-CDR1
GTFSSYAIS

SEQ ID NO: 1099 - protein, 11 aa, Artificial sequence
  BIIB-9-568 VH-CDR1
GSISSSSYYWG

SEQ ID NO: 1100 - protein, 9 aa, Artificial sequence
  BIIB-9-615 VH-CDR1
YTFTSYYMH

SEQ ID NO: 1101 - protein, 9 aa, Artificial sequence
  BIIB-9-628 VH-CDR1
YTFTSYYMH

SEQ ID NO: 1102 - protein, 9 aa, Artificial sequence
  BIIB-9-882 VH-CDR1
YTFTSYYMH

SEQ ID NO: 1103 - protein, 11 aa, Artificial sequence
  BIIB-9-884 VH-CDR1
GSISSSDYYWG

SEQ ID NO: 1104 - protein, 9 aa, Artificial sequence
  BIIB-9-886 VH-CDR1
YTFTSYYMH

SEQ ID NO: 1105 - protein, 9 aa, Artificial sequence
  BIIB-9-887 VH-CDR1
YTFTSYYMV

SEQ ID NO: 1106 - protein, 9 aa, Artificial sequence
  BIIB-9-888 VH-CDR1
YTFTSYYMH

SEQ ID NO: 1107 - protein, 11 aa, Artificial sequence
  BIIB-9-889 VH-CDR1
GSISSSSYYWG

SEQ ID NO: 1108 - protein, 11 aa, Artificial sequence
  BIIB-9-433 VH-CDR1
GSISSSRYYWG

SEQ ID NO: 1109 - protein, 9 aa, Artificial sequence
  BIIB-9-445 VH-CDR1
YTFTSYYIH

SEQ ID NO: 1110 - protein, 9 aa, Artificial sequence
  BIIB-9-470 VH-CDR1
FTFSSYWMS

SEQ ID NO: 1111 - protein, 11 aa, Artificial sequence
  BIIB-9-625 VH-CDR1
GSISSSSYAWG

SEQ ID NO: 1112 - protein, 9 aa, Artificial sequence
  BIIB-9-1264 VH-CDR1
YTFTSYYMH

SEQ ID NO: 1113 - protein, 11 aa, Artificial sequence
  BIIB-9-1265 VH-CDR1
GSISSSSYYWG

SEQ ID NO: 1114 - protein, 9 aa, Artificial sequence
  BIIB-9-1266 VH-CDR1
YTFTSYYMH

SEQ ID NO: 1115 - protein, 9 aa, Artificial sequence
  BIIB-9-1267 VH-CDR1
YTFTSYYMH

SEQ ID NO: 1116 - protein, 9 aa, Artificial sequence
  BIIB-9-1268 VH-CDR1
YTFTSYYMH

SEQ ID NO: 1117 - protein, 9 aa, Artificial sequence
  BIIB-9-1269 VH-CDR1
YTFTSYYMH

SEQ ID NO: 1118 - protein, 9 aa, Artificial sequence
  BIIB-9-1270 VH-CDR1
YTFTSYYMH

SEQ ID NO: 1119 - protein, 9 aa, Artificial sequence
  BIIB-9-1271 VH-CDR1
YTFTSYYMH

SEQ ID NO: 1120 - protein, 9 aa, Artificial sequence
  BIIB-9-1272 VH-CDR1
YTFTSYYMH

SEQ ID NO: 1121 - protein, 9 aa, Artificial sequence
  BIIB-9-1273 VH-CDR1
YTFTSYYMH

SEQ ID NO: 1122 - protein, 9 aa, Artificial sequence
  BIIB-9-1274 VH-CDR1
YTFTSYYMH

SEQ ID NO: 1123 - protein, 11 aa, Artificial sequence
  BIIB-9-1275 VH-CDR1
GSISSSSYYWG

SEQ ID NO: 1124 - protein, 11 aa, Artificial sequence
  BIIB-9-1276 VH-CDR1
GSISSSSYYWG

SEQ ID NO: 1125 - protein, 9 aa, Artificial sequence
  BIIB-9-1277 VH-CDR1
YTFTSYYMH

SEQ ID NO: 1126 - protein, 9 aa, Artificial sequence
  BIIB-9-1278 VH-CDR1
YTFTSYYMV

SEQ ID NO: 1127 - protein, 9 aa, Artificial sequence
  BIIB-9-1279 VH-CDR1
YTFTSYYMH

SEQ ID NO: 1128 - protein, 9 aa, Artificial sequence
  BIIB-9-1280 VH-CDR1
YTFTSYYMV

SEQ ID NO: 1129 - protein, 9 aa, Artificial sequence
  BIIB-9-1281 VH-CDR1
GSFSGYYWS

SEQ ID NO: 1130 - protein, 9 aa, Artificial sequence
  BIIB-9-1282 VH-CDR1
YTFTSYYMV

SEQ ID NO: 1131 - protein, 9 aa, Artificial sequence
  BIIB-9-1283 VH-CDR1
YTFTSYYMV

SEQ ID NO: 1132 - protein, 9 aa, Artificial sequence
  BIIB-9-1284 VH-CDR1
YTFTSYYMV

SEQ ID NO: 1133 - protein, 9 aa, Artificial sequence
  BIIB-9-1285 VH-CDR1
YTFTSYYMV

SEQ ID NO: 1134 - protein, 9 aa, Artificial sequence
  BIIB-9-1286 VH-CDR1
YTFTSYYMV

SEQ ID NO: 1135 - protein, 11 aa, Artificial sequence
  BIIB-9-1287 VH-CDR1
GSISSSDYYWG

SEQ ID NO: 1136 - protein, 16 aa, Artificial sequence
  BIIB-9-607 VH-CDR2
SISYSGSTYYNPSLKS

SEQ ID NO: 1137 - protein, 16 aa, Artificial sequence
  BIIB-9-471 VH-CDR2
YIYYSGSTYYNPSLKS

SEQ ID NO: 1138 - protein, 17 aa, Artificial sequence
  BIIB-9-472 VH-CDR2
SISSSSSYIYYADSVKG

SEQ ID NO: 1139 - protein, 17 aa, Artificial sequence
  BIIB-9-439 VH-CDR2
IINPSGGSTTYAQKFQG

SEQ ID NO: 1140 - protein, 17 aa, Artificial sequence
  BIIB-9-446 VH-CDR2
GIIPIFGTASYAQKFQG

SEQ ID NO: 1141 - protein, 16 aa, Artificial sequence
  BIIB-9-568 VH-CDR2
SIYYSGSTYYNPSLKS

SEQ ID NO: 1142 - protein, 17 aa, Artificial sequence
  BIIB-9-615 VH-CDR2
IINPSGGSTSYAQKFQG

SEQ ID NO: 1143 - protein, 17 aa, Artificial sequence
  BIIB-9-628 VH-CDR2
IINPSGGSTSYAQKFQG

SEQ ID NO: 1144 - protein, 17 aa, Artificial sequence
  BIIB-9-882 VH-CDR2
IINPSGGSTSYAQKFQG

SEQ ID NO: 1145 - protein, 16 aa, Artificial sequence
  BIIB-9-884 VH-CDR2
SIYYSGSTYYNPSLKS

SEQ ID NO: 1146 - protein, 17 aa, Artificial sequence
  BIIB-9-886 VH-CDR2
IINPSGGSTSYAQKFQG

SEQ ID NO: 1147 - protein, 17 aa, Artificial sequence
  BIIB-9-887 VH-CDR2
IINPSGGSTSYAQKFQG

SEQ ID NO: 1148 - protein, 17 aa, Artificial sequence
  BIIB-9-888 VH-CDR2
IINPSGGSTSYAQKFQG

SEQ ID NO: 1149 - protein, 16 aa, Artificial sequence
  BIIB-9-889 VH-CDR2
SIYYSGSTYYNPSLKS

SEQ ID NO: 1150 - protein, 16 aa, Artificial sequence
  BIIB-9-433 VH-CDR2
SIYYSGSTYYNPSLKS

SEQ ID NO: 1151 - protein, 17 aa, Artificial sequence
  BIIB-9-445 VH-CDR2
IINPSGGSTSYAQKFQG

SEQ ID NO: 1152 - protein, 17 aa, Artificial sequence
  BIIB-9-470 VH-CDR2
NIKQDGSEKYYVDSVKG

SEQ ID NO: 1153 - protein, 16 aa, Artificial sequence
  BIIB-9-625 VH-CDR2
SIYYSGSTYYNPSLKS

SEQ ID NO: 1154 - protein, 17 aa, Artificial sequence
  BIIB-9-1264 VH-CDR2
IINPSGGSTSYAQKFQG

SEQ ID NO: 1155 - protein, 16 aa, Artificial sequence
  BIIB-9-1265 VH-CDR2
SIYYSGSTYYNPSLKS

SEQ ID NO: 1156 - protein, 17 aa, Artificial sequence
  BIIB-9-1266 VH-CDR2
IINPSGGSTSYAQKFQG

SEQ ID NO: 1157 - protein, 17 aa, Artificial sequence
  BIIB-9-1267 VH-CDR2
IINPSGGSTSYAQKFQG

SEQ ID NO: 1158 - protein, 17 aa, Artificial sequence
  BIIB-9-1268 VH-CDR2
IINPSGGSTSYAQKFQG

SEQ ID NO: 1159 - protein, 17 aa, Artificial sequence
  BIIB-9-1269 VH-CDR2
IINPSGGSTSYAQKFQG

SEQ ID NO: 1160 - protein, 17 aa, Artificial sequence
  BIIB-9-1270 VH-CDR2
IINPSGGSTSYAQKFQG

SEQ ID NO: 1161 - protein, 17 aa, Artificial sequence
  BIIB-9-1271 VH-CDR2
IINPSGGSTSYAQKFQG

SEQ ID NO: 1162 - protein, 17 aa, Artificial sequence
  BIIB-9-1272 VH-CDR2
IINPSGGSTSYAQKFQG

SEQ ID NO: 1163 - protein, 17 aa, Artificial sequence
  BIIB-9-1273 VH-CDR2
IINPSGGSTSYAQKFQG

SEQ ID NO: 1164 - protein, 17 aa, Artificial sequence
  BIIB-9-1274 VH-CDR2
IINPSGGSTSYAQKFQG

SEQ ID NO: 1165 - protein, 16 aa, Artificial sequence
  BIIB-9-1275 VH-CDR2
SIYYSGSTYYNPSLKS

SEQ ID NO: 1166 - protein, 16 aa, Artificial sequence
  BIIB-9-1276 VH-CDR2
SIYYSGSTYYNPSLKS

SEQ ID NO: 1167 - protein, 17 aa, Artificial sequence
  BIIB-9-1277 VH-CDR2
IINPSGGSTSYAQKFQG

SEQ ID NO: 1168 - protein, 17 aa, Artificial sequence
  BIIB-9-1278 VH-CDR2
IINPSGGSTSYAQKFQG

SEQ ID NO: 1169 - protein, 17 aa, Artificial sequence
  BIIB-9-1279 VH-CDR2
IINPSGGSTSYAQKFQG

SEQ ID NO: 1170 - protein, 17 aa, Artificial sequence
  BIIB-9-1280 VH-CDR2
IINPSGGSTSYAQKFQG

SEQ ID NO: 1171 - protein, 16 aa, Artificial sequence
  BIIB-9-1281 VH-CDR2
EIDHSGSTNYNPSLKS

SEQ ID NO: 1172 - protein, 17 aa, Artificial sequence
  BIIB-9-1282 VH-CDR2
IINPSGGSTSYAQKFQG

SEQ ID NO: 1173 - protein, 17 aa, Artificial sequence
  BIIB-9-1283 VH-CDR2
IINPSGGSTSYAQKFQG

SEQ ID NO: 1174 - protein, 17 aa, Artificial sequence
  BIIB-9-1284 VH-CDR2
IINPSGGSTSYAQKFQG

SEQ ID NO: 1175 - protein, 17 aa, Artificial sequence
  BIIB-9-1285 VH-CDR2
IINPSGGSTSYAQKFQG

SEQ ID NO: 1176 - protein, 17 aa, Artificial sequence
  BIIB-9-1286 VH-CDR2
IINPSGGSTSYAQKFQG

SEQ ID NO: 1177 - protein, 16 aa, Artificial sequence
  BIIB-9-1287 VH-CDR2
SIYYSGSTYYNPSLKS

SEQ ID NO: 1178 - protein, 13 aa, Artificial sequence
  BIIB-9-607 VH-CDR3
ARDRGYSYEDFDL

SEQ ID NO: 1179 - protein, 16 aa, Artificial sequence
  BIIB-9-471 VH-CDR3
ARSGVSGSGSDNWFDP

SEQ ID NO: 1180 - protein, 14 aa, Artificial sequence
  BIIB-9-472 VH-CDR3
ARGGRYSGSWSWNI

SEQ ID NO: 1181 - protein, 13 aa, Artificial sequence
  BIIB-9-439 VH-CDR3
AREATESYYYMDV

SEQ ID NO: 1182 - protein, 14 aa, Artificial sequence
  BIIB-9-446 VH-CDR3
ARGLEVGYYGYFDY

SEQ ID NO: 1183 - protein, 13 aa, Artificial sequence
  BIIB-9-568 VH-CDR3
ARDLGYAATYFDL

SEQ ID NO: 1184 - protein, 15 aa, Artificial sequence
  BIIB-9-615 VH-CDR3
ARDSPSSSSYWSLDL

SEQ ID NO: 1185 - protein, 13 aa, Artificial sequence
  BIIB-9-628 VH-CDR3
AREPIAYGATLDL

SEQ ID NO: 1186 - protein, 15 aa, Artificial sequence
  BIIB-9-882 VH-CDR3
ARGPTDSSGYLDMDV

SEQ ID NO: 1187 - protein, 16 aa, Artificial sequence
  BIIB-9-884 VH-CDR3
ARSPRHKVRGPNWFDP

SEQ ID NO: 1188 - protein, 14 aa, Artificial sequence
  BIIB-9-886 VH-CDR3
ARDPAHSYLDAFDI

SEQ ID NO: 1189 - protein, 14 aa, Artificial sequence
  BIIB-9-887 VH-CDR3
ARDAEAHWIPGMDV

SEQ ID NO: 1190 - protein, 15 aa, Artificial sequence
  BIIB-9-888 VH-CDR3
ARGPTDSSGYLDMDV

SEQ ID NO: 1191 - protein, 13 aa, Artificial sequence
  BIIB-9-889 VH-CDR3
ARDVGWYTEYFDL

SEQ ID NO: 1192 - protein, 13 aa, Artificial sequence
  BIIB-9-433 VH-CDR3
ARDAGYSAELFDY

SEQ ID NO: 1193 - protein, 12 aa, Artificial sequence
  BIIB-9-445 VH-CDR3
ARDVGQDYWFDL

SEQ ID NO: 1194 - protein, 12 aa, Artificial sequence
  BIIB-9-470 VH-CDR3
ARDAGIAWALDY

SEQ ID NO: 1195 - protein, 13 aa, Artificial sequence
  BIIB-9-625 VH-CDR3
ARDRGWYTEVLDI

SEQ ID NO: 1196 - protein, 13 aa, Artificial sequence
  BIIB-9-1264 VH-CDR3
ARDGDSSVYAFDY

SEQ ID NO: 1197 - protein, 13 aa, Artificial sequence
  BIIB-9-1265 VH-CDR3
ARDGRHYYELFDY

SEQ ID NO: 1198 - protein, 13 aa, Artificial sequence
  BIIB-9-1266 VH-CDR3
ARDHGWAIYGMDV

SEQ ID NO: 1199 - protein, 13 aa, Artificial sequence
  BIIB-9-1267 VH-CDR3
ARDHGWAIYGMDV

SEQ ID NO: 1200 - protein, 12 aa, Artificial sequence
  BIIB-9-1268 VH-CDR3
ARDPPSWYVFDI

SEQ ID NO: 1201 - protein, 12 aa, Artificial sequence
  BIIB-9-1269 VH-CDR3
ARDRGQYYHFDL

SEQ ID NO: 1202 - protein, 11 aa, Artificial sequence
  BIIB-9-1270 VH-CDR3
ARDTGGYAFDI

SEQ ID NO: 1203 - protein, 11 aa, Artificial sequence
  BIIB-9-1271 VH-CDR3
ARDTGGYAFDI

SEQ ID NO: 1204 - protein, 11 aa, Artificial sequence
  BIIB-9-1272 VH-CDR3
ARDTGGYAFDI

SEQ ID NO: 1205 - protein, 11 aa, Artificial sequence
  BIIB-9-1273 VH-CDR3
ARDTGGYAFDI

SEQ ID NO: 1206 - protein, 11 aa, Artificial sequence
  BIIB-9-1274 VH-CDR3
ARDTGGYAFDI

SEQ ID NO: 1207 - protein, 13 aa, Artificial sequence
  BIIB-9-1275 VH-CDR3
ARDVGRTYELFDI

SEQ ID NO: 1208 - protein, 13 aa, Artificial sequence
  BIIB-9-1276 VH-CDR3
ARDVGRTYELFDI

SEQ ID NO: 1209 - protein, 25 aa, Artificial sequence
  BIIB-9-1277 VH-CDR3
ARGGTGYYYGSGSRDGYHYYYGMDV

SEQ ID NO: 1210 - protein, 15 aa, Artificial sequence
  BIIB-9-1278 VH-CDR3
ARGPGELGYYLAFDI

SEQ ID NO: 1211 - protein, 15 aa, Artificial sequence
  BIIB-9-1279 VH-CDR3
ARGPTDSSGYLDMDV

SEQ ID NO: 1212 - protein, 13 aa, Artificial sequence
  BIIB-9-1280 VH-CDR3
ARGPWYSYYYMDV

SEQ ID NO: 1213 - protein, 13 aa, Artificial sequence
  BIIB-9-1281 VH-CDR3
ARTTRSKYYGMDV

SEQ ID NO: 1214 - protein, 15 aa, Artificial sequence
  BIIB-9-1282 VH-CDR3
ARVPTYRYSYLAFDI

SEQ ID NO: 1215 - protein, 15 aa, Artificial sequence
  BIIB-9-1283 VH-CDR3
ARVPTYRYSYLAFDI

SEQ ID NO: 1216 - protein, 15 aa, Artificial sequence
  BIIB-9-1284 VH-CDR3
ARVPTYRYSYLAFDI

SEQ ID NO: 1217 - protein, 15 aa, Artificial sequence
  BIIB-9-1285 VH-CDR3
ARVPTYRYSYLAFDI

SEQ ID NO: 1218 - protein, 15 aa, Artificial sequence
  BIIB-9-1286 VH-CDR3
ARVPTYRYSYLAFDI

SEQ ID NO: 1219 - protein, 16 aa, Artificial sequence
  BIIB-9-1287 VH-CDR3
ARSPRHKVRGPNWFDP

SEQ ID NO: 1220 - protein, 11 aa, Artificial sequence
  BIIB-9-607 VL-CDR1
RASQSISSWLA

SEQ ID NO: 1221 - protein, 11 aa, Artificial sequence
  BIIB-9-471 VL-CDR1
RASQSVSRYLA

SEQ ID NO: 1222 - protein, 11 aa, Artificial sequence
  BIIB-9-472 VL-CDR1
RASQSVSSYLA

SEQ ID NO: 1223 - protein, 11 aa, Artificial sequence
  BIIB-9-439 VL-CDR1
RASQSVSSYLA

SEQ ID NO: 1224 - protein, 12 aa, Artificial sequence
  BIIB-9-446 VL-CDR1
RASQSVSSSYLA

SEQ ID NO: 1225 - protein, 11 aa, Artificial sequence
  BIIB-9-568 VL-CDR1
QASQDISNYLN

SEQ ID NO: 1226 - protein, 11 aa, Artificial sequence
  BIIB-9-615 VL-CDR1
RASQSVSSYLA

SEQ ID NO: 1227 - protein, 12 aa, Artificial sequence
  BIIB-9-628 VL-CDR1
RASQSVSSDYLA

SEQ ID NO: 1228 - protein, 11 aa, Artificial sequence
  BIIB-9-882 VL-CDR1
RASQSVSSNLA

SEQ ID NO: 1229 - protein, 12 aa, Artificial sequence
  BIIB-9-884 VL-CDR1
RASQSVSSSYLA

SEQ ID NO: 1230 - protein, 11 aa, Artificial sequence
  BIIB-9-886 VL-CDR1
RASQGISSWLA

SEQ ID NO: 1231 - protein, 11 aa, Artificial sequence
  BIIB-9-887 VL-CDR1
RASQGISSWLA

SEQ ID NO: 1232 - protein, 11 aa, Artificial sequence
  BIIB-9-888 VL-CDR1
RASQSVSSNLA

SEQ ID NO: 1233 - protein, 11 aa, Artificial sequence
  BIIB-9-889 VL-CDR1
RASQSVSSNLA

SEQ ID NO: 1234 - protein, 11 aa, Artificial sequence
  BIIB-9-433 VL-CDR1
RASQSVSSYLA

SEQ ID NO: 1235 - protein, 11 aa, Artificial sequence
  BIIB-9-445 VL-CDR1
RASQSVSSNLA

SEQ ID NO: 1236 - protein, 11 aa, Artificial sequence
  BIIB-9-470 VL-CDR1
RASQSISSWLA

SEQ ID NO: 1237 - protein, 11 aa, Artificial sequence
  BIIB-9-625 VL-CDR1
RASQSISSYLN

SEQ ID NO: 1238 - protein, 11 aa, Artificial sequence
  BIIB-9-1264 VL-CDR1
QASQDITNYLN

SEQ ID NO: 1239 - protein, 11 aa, Artificial sequence
  BIIB-9-1265 VL-CDR1
RASQGISSWLA

SEQ ID NO: 1240 - protein, 11 aa, Artificial sequence
  BIIB-9-1266 VL-CDR1
RASQSVSSYLA

SEQ ID NO: 1241 - protein, 17 aa, Artificial sequence
  BIIB-9-1267 VL-CDR1
KSSQSVLYSSNNKNYLA

SEQ ID NO: 1242 - protein, 11 aa, Artificial sequence
  BIIB-9-1268 VL-CDR1
RASQSVSSYLA

SEQ ID NO: 1243 - protein, 11 aa, Artificial sequence
  BIIB-9-1269 VL-CDR1
RASQGISSWLA

SEQ ID NO: 1244 - protein, 11 aa, Artificial sequence
  BIIB-9-1270 VL-CDR1
RASQSVSSYLA

SEQ ID NO: 1245 - protein, 11 aa, Artificial sequence
  BIIB-9-1271 VL-CDR1
RASQSVSSNLA

SEQ ID NO: 1246 - protein, 11 aa, Artificial sequence
  BIIB-9-1272 VL-CDR1
RASQGISSWLA

SEQ ID NO: 1247 - protein, 11 aa, Artificial sequence
  BIIB-9-1273 VL-CDR1
RASQSVSSYLA

SEQ ID NO: 1248 - protein, 11 aa, Artificial sequence
  BIIB-9-1274 VL-CDR1
RASQGISSWLA

SEQ ID NO: 1249 - protein, 11 aa, Artificial sequence
  BIIB-9-1275 VL-CDR1
RASQGISGWLA

SEQ ID NO: 1250 - protein, 11 aa, Artificial sequence
  BIIB-9-1276 VL-CDR1
RASQGISSWLA

SEQ ID NO: 1251 - protein, 11 aa, Artificial sequence
  BIIB-9-1277 VL-CDR1
RASQSVSSYLA

SEQ ID NO: 1252 - protein, 11 aa, Artificial sequence
  BIIB-9-1278 VL-CDR1
RASQSVSSNLA

SEQ ID NO: 1253 - protein, 11 aa, Artificial sequence
  BIIB-9-1279 VL-CDR1
RASQGISSWLA

SEQ ID NO: 1254 - protein, 11 aa, Artificial sequence
  BIIB-9-1280 VL-CDR1
RASQSISSYLN

SEQ ID NO: 1255 - protein, 11 aa, Artificial sequence
  BIIB-9-1281 VL-CDR1
RASQSISSWLA

SEQ ID NO: 1256 - protein, 11 aa, Artificial sequence
  BIIB-9-1282 VL-CDR1
RASQSVSSNLA

SEQ ID NO: 1257 - protein, 11 aa, Artificial sequence
  BIIB-9-1283 VL-CDR1
RASQGISSWLA

SEQ ID NO: 1258 - protein, 11 aa, Artificial sequence
  BIIB-9-1284 VL-CDR1
RASQSVGSNLA

SEQ ID NO: 1259 - protein, 11 aa, Artificial sequence
  BIIB-9-1285 VL-CDR1
RASQSVSSNLA

SEQ ID NO: 1260 - protein, 11 aa, Artificial sequence
  BIIB-9-1286 VL-CDR1
RASQGISSWLA

SEQ ID NO: 1261 - protein, 12 aa, Artificial sequence
  BIIB-9-1287 VL-CDR1
RASQSVSSSYLA

SEQ ID NO: 1262 - protein, 7 aa, Artificial sequence
  BIIB-9-607 VL-CDR2
KASSLES

SEQ ID NO: 1263 - protein, 7 aa, Artificial sequence
  BIIB-9-471 VL-CDR2
DASNRAT

SEQ ID NO: 1264 - protein, 7 aa, Artificial sequence
  BIIB-9-472 VL-CDR2
DASNRAT

SEQ ID NO: 1265 - protein, 7 aa, Artificial sequence
  BIIB-9-439 VL-CDR2
DSSNRAT

SEQ ID NO: 1266 - protein, 7 aa, Artificial sequence
  BIIB-9-446 VL-CDR2
GASRRAT

SEQ ID NO: 1267 - protein, 7 aa, Artificial sequence
  BIIB-9-568 VL-CDR2
DASNLET

SEQ ID NO: 1268 - protein, 7 aa, Artificial sequence
  BIIB-9-615 VL-CDR2
DASNRAT

SEQ ID NO: 1269 - protein, 7 aa, Artificial sequence
  BIIB-9-628 VL-CDR2
GASSRAT

SEQ ID NO: 1270 - protein, 7 aa, Artificial sequence
  BIIB-9-882 VL-CDR2
GASTRAT

SEQ ID NO: 1271 - protein, 7 aa, Artificial sequence
  BIIB-9-884 VL-CDR2
GASSRAT

SEQ ID NO: 1272 - protein, 7 aa, Artificial sequence
  BIIB-9-886 VL-CDR2
AASSLQS

SEQ ID NO: 1273 - protein, 7 aa, Artificial sequence
  BIIB-9-887 VL-CDR2
AASSLQS

SEQ ID NO: 1274 - protein, 7 aa, Artificial sequence
  BIIB-9-888 VL-CDR2
GASTRAT

SEQ ID NO: 1275 - protein, 7 aa, Artificial sequence
  BIIB-9-889 VL-CDR2
GASTRAT

SEQ ID NO: 1276 - protein, 7 aa, Artificial sequence
  BIIB-9-433 VL-CDR2
DASNRAT

SEQ ID NO: 1277 - protein, 7 aa, Artificial sequence
  BIIB-9-445 VL-CDR2
SASTRAT

SEQ ID NO: 1278 - protein, 7 aa, Artificial sequence
  BIIB-9-470 VL-CDR2
KASSLES

SEQ ID NO: 1279 - protein, 7 aa, Artificial sequence
  BIIB-9-625 VL-CDR2
AASSLQS

SEQ ID NO: 1280 - protein, 7 aa, Artificial sequence
  BIIB-9-1264 VL-CDR2
DASNLET

SEQ ID NO: 1281 - protein, 7 aa, Artificial sequence
  BIIB-9-1265 VL-CDR2
AASSLQS

SEQ ID NO: 1282 - protein, 7 aa, Artificial sequence
  BIIB-9-1266 VL-CDR2
DSSNRAT

SEQ ID NO: 1283 - protein, 7 aa, Artificial sequence
  BIIB-9-1267 VL-CDR2
WASTRES

SEQ ID NO: 1284 - protein, 7 aa, Artificial sequence
  BIIB-9-1268 VL-CDR2
DASNRAT

SEQ ID NO: 1285 - protein, 7 aa, Artificial sequence
  BIIB-9-1269 VL-CDR2
AASSLQS

SEQ ID NO: 1286 - protein, 7 aa, Artificial sequence
  BIIB-9-1270 VL-CDR2
DASNRAT

SEQ ID NO: 1287 - protein, 7 aa, Artificial sequence
  BIIB-9-1271 VL-CDR2
GASTRAT

SEQ ID NO: 1288 - protein, 7 aa, Artificial sequence
  BIIB-9-1272 VL-CDR2
AASSLQS

SEQ ID NO: 1289 - protein, 7 aa, Artificial sequence
  BIIB-9-1273 VL-CDR2
DASNRAT

SEQ ID NO: 1290 - protein, 7 aa, Artificial sequence
  BIIB-9-1274 VL-CDR2
AASSLQS

SEQ ID NO: 1291 - protein, 7 aa, Artificial sequence
  BIIB-9-1275 VL-CDR2
AASSLQS

SEQ ID NO: 1292 - protein, 7 aa, Artificial sequence
  BIIB-9-1276 VL-CDR2
AASSLQS

SEQ ID NO: 1293 - protein, 7 aa, Artificial sequence
  BIIB-9-1277 VL-CDR2
DASNRAT

SEQ ID NO: 1294 - protein, 7 aa, Artificial sequence
  BIIB-9-1278 VL-CDR2
GASTRAT

SEQ ID NO: 1295 - protein, 7 aa, Artificial sequence
  BIIB-9-1279 VL-CDR2
AASSLQS

SEQ ID NO: 1296 - protein, 7 aa, Artificial sequence
  BIIB-9-1280 VL-CDR2
AASSLQS

SEQ ID NO: 1297 - protein, 7 aa, Artificial sequence
  BIIB-9-1281 VL-CDR2
KASSLES

SEQ ID NO: 1298 - protein, 7 aa, Artificial sequence
  BIIB-9-1282 VL-CDR2
GASTRAT

SEQ ID NO: 1299 - protein, 7 aa, Artificial sequence
  BIIB-9-1283 VL-CDR2
AASSLQS

SEQ ID NO: 1300 - protein, 7 aa, Artificial sequence
  BIIB-9-1284 VL-CDR2
GASTRAT

SEQ ID NO: 1301 - protein, 7 aa, Artificial sequence
  BIIB-9-1285 VL-CDR2
GASTRAT

SEQ ID NO: 1302 - protein, 7 aa, Artificial sequence
  BIIB-9-1286 VL-CDR2
AASSLQS

SEQ ID NO: 1303 - protein, 7 aa, Artificial sequence
  BIIB-9-1287 VL-CDR2
GASSRAT

SEQ ID NO: 1304 - protein, 9 aa, Artificial sequence
  BIIB-9-607 VL-CDR3
QQAGRYPLT

SEQ ID NO: 1305 - protein, 9 aa, Artificial sequence
  BIIB-9-471 VL-CDR3
QQDYNYPFT

SEQ ID NO: 1306 - protein, 8 aa, Artificial sequence
  BIIB-9-472 VL-CDR3
QQRSDWPT

SEQ ID NO: 1307 - protein, 9 aa, Artificial sequence
  BIIB-9-439 VL-CDR3
QQRDNWPFT

SEQ ID NO: 1308 - protein, 9 aa, Artificial sequence
  BIIB-9-446 VL-CDR3
QQYGNSPLT

SEQ ID NO: 1309 - protein, 8 aa, Artificial sequence
  BIIB-9-568 VL-CDR3
QQYDDYLT

SEQ ID NO: 1310 - protein, 9 aa, Artificial sequence
  BIIB-9-615 VL-CDR3
QQSCHWPWT

SEQ ID NO: 1311 - protein, 9 aa, Artificial sequence
  BIIB-9-628 VL-CDR3
QQYVVFPFT

SEQ ID NO: 1312 - protein, 9 aa, Artificial sequence
  BIIB-9-882 VL-CDR3
QQHDNFPPT

SEQ ID NO: 1313 - protein, 9 aa, Artificial sequence
  BIIB-9-884 VL-CDR3
QQYHLLPPT

SEQ ID NO: 1314 - protein, 9 aa, Artificial sequence
  BIIB-9-886 VL-CDR3
QQASSFPFT

SEQ ID NO: 1315 - protein, 9 aa, Artificial sequence
  BIIB-9-887 VL-CDR3
QQASSFPFT

SEQ ID NO: 1316 - protein, 9 aa, Artificial sequence
  BIIB-9-888 VL-CDR3
QQAFNWPPT

SEQ ID NO: 1317 - protein, 9 aa, Artificial sequence
  BIIB-9-889 VL-CDR3
QQAFNWPPT

SEQ ID NO: 1318 - protein, 9 aa, Artificial sequence
  BIIB-9-433 VL-CDR3
QQSSAYPPT

SEQ ID NO: 1319 - protein, 9 aa, Artificial sequence
  BIIB-9-445 VL-CDR3
QQYDNFPFT

SEQ ID NO: 1320 - protein, 7 aa, Artificial sequence
  BIIB-9-470 VL-CDR3
QHPHSWT

SEQ ID NO: 1321 - protein, 9 aa, Artificial sequence
  BIIB-9-625 VL-CDR3
QQSDTDPPT

SEQ ID NO: 1322 - protein, 9 aa, Artificial sequence
  BIIB-9-1264 VL-CDR3
QQVDDYPFT

SEQ ID NO: 1323 - protein, 9 aa, Artificial sequence
  BIIB-9-1265 VL-CDR3
QQGNSFPIT

SEQ ID NO: 1324 - protein, 9 aa, Artificial sequence
  BIIB-9-1266 VL-CDR3
QQRLNFPFT

SEQ ID NO: 1325 - protein, 9 aa, Artificial sequence
  BIIB-9-1267 VL-CDR3
QQHYVFPFT

SEQ ID NO: 1326 - protein, 9 aa, Artificial sequence
  BIIB-9-1268 VL-CDR3
QQATVWPFT

SEQ ID NO: 1327 - protein, 9 aa, Artificial sequence
  BIIB-9-1269 VL-CDR3
QQASSFPFT

SEQ ID NO: 1328 - protein, 9 aa, Artificial sequence
  BIIB-9-1270 VL-CDR3
QQSADFPFT

SEQ ID NO: 1329 - protein, 9 aa, Artificial sequence
  BIIB-9-1271 VL-CDR3
QQGFSFPFT

SEQ ID NO: 1330 - protein, 9 aa, Artificial sequence
  BIIB-9-1272 VL-CDR3
QQASSFPFT

SEQ ID NO: 1331 - protein, 9 aa, Artificial sequence
  BIIB-9-1273 VL-CDR3
QQSANFPFT

SEQ ID NO: 1332 - protein, 9 aa, Artificial sequence
  BIIB-9-1274 VL-CDR3
QQANSFPFT

SEQ ID NO: 1333 - protein, 9 aa, Artificial sequence
  BIIB-9-1275 VL-CDR3
QQANSLPIT

SEQ ID NO: 1334 - protein, 9 aa, Artificial sequence
  BIIB-9-1276 VL-CDR3
QQGNSFPIT

SEQ ID NO: 1335 - protein, 9 aa, Artificial sequence
  BIIB-9-1277 VL-CDR3
QQSANWPPT

SEQ ID NO: 1336 - protein, 9 aa, Artificial sequence
  BIIB-9-1278 VL-CDR3
QQHANFPPT

SEQ ID NO: 1337 - protein, 9 aa, Artificial sequence
  BIIB-9-1279 VL-CDR3
QQASSFPPT

SEQ ID NO: 1338 - protein, 9 aa, Artificial sequence
  BIIB-9-1280 VL-CDR3
QQAYSLPIT

SEQ ID NO: 1339 - protein, 9 aa, Artificial sequence
  BIIB-9-1281 VL-CDR3
QQAISLPIT

SEQ ID NO: 1340 - protein, 9 aa, Artificial sequence
  BIIB-9-1282 VL-CDR3
QQHNHLPIT

SEQ ID NO: 1341 - protein, 9 aa, Artificial sequence
  BIIB-9-1283 VL-CDR3
QQASSFPPT

SEQ ID NO: 1342 - protein, 9 aa, Artificial sequence
  BIIB-9-1284 VL-CDR3
QQHNHLPIT

SEQ ID NO: 1343 - protein, 9 aa, Artificial sequence
  BIIB-9-1285 VL-CDR3
QQASNFPPT

SEQ ID NO: 1344 - protein, 9 aa, Artificial sequence
  BIIB-9-1286 VL-CDR3
QQASSFPPT

SEQ ID NO: 1345 - protein, 8 aa, Artificial sequence
  BIIB-9-1287 VL-CDR3
QQYHLHPT

SEQ ID NO: 1346 - protein, 10 aa, Artificial sequence
  BIIB-9-397 VH-CDR1
YSISSGYYWA

SEQ ID NO: 1347 - protein, 11 aa, Artificial sequence
  BIIB-9-578 VH-CDR1
GSISSSSYYWG

SEQ ID NO: 1348 - protein, 9 aa, Artificial sequence
  BIIB-9-631 VH-CDR1
YTFTSYYMH

SEQ ID NO: 1349 - protein, 9 aa, Artificial sequence
  BIIB-9-612 VH-CDR1
YTFTSYYMH

SEQ ID NO: 1350 - protein, 16 aa, Artificial sequence
  BIIB-9-397 VH-CDR2
SIYHSGSTYYNPSLKS

SEQ ID NO: 1351 - protein, 16 aa, Artificial sequence
  BIIB-9-578 VH-CDR2
SISYSGSTYYNPSLKS

SEQ ID NO: 1352 - protein, 17 aa, Artificial sequence
  BIIB-9-631 VH-CDR2
IINPSGGSTSYAQKFQG

SEQ ID NO: 1353 - protein, 17 aa, Artificial sequence
  BIIB-9-612 VH-CDR2
IINPSGGSTSYAQKFQG

SEQ ID NO: 1354 - protein, 12 aa, Artificial sequence
  BIIB-9-397 VH-CDR3
ARDVWYVGGFDP

SEQ ID NO: 1355 - protein, 12 aa, Artificial sequence
  BIIB-9-578 VH-CDR3
ARDKYQDYSFDI

SEQ ID NO: 1356 - protein, 11 aa, Artificial sequence
  BIIB-9-631 VH-CDR3
ARAENRGDYEA

SEQ ID NO: 1357 - protein, 13 aa, Artificial sequence
  BIIB-9-612 VH-CDR3
ARDAGYHWYGMDV

SEQ ID NO: 1358 - protein, 11 aa, Artificial sequence
  BIIB-9-397 VL-CDR1
QASQDISNYLN

SEQ ID NO: 1359 - protein, 11 aa, Artificial sequence
  BIIB-9-578 VL-CDR1
RASQGIDSWLA

SEQ ID NO: 1360 - protein, 11 aa, Artificial sequence
  BIIB-9-631 VL-CDR1
RASQGISRWLA

SEQ ID NO: 1361 - protein, 11 aa, Artificial sequence
  BIIB-9-612 VL-CDR1
RASQSVSRYLA

SEQ ID NO: 1362 - protein, 7 aa, Artificial sequence
  BIIB-9-397 VL-CDR2
DASNLET

SEQ ID NO: 1363 - protein, 7 aa, Artificial sequence
  BIIB-9-578 VL-CDR2
AASSLQS

SEQ ID NO: 1364 - protein, 7 aa, Artificial sequence
  BIIB-9-631 VL-CDR2
AASSLQS

SEQ ID NO: 1365 - protein, 7 aa, Artificial sequence
  BIIB-9-612 VL-CDR2
DASNRAT

SEQ ID NO: 1366 - protein, 9 aa, Artificial sequence
  BIIB-9-397 VL-CDR3
QQSDDHPPT

SEQ ID NO: 1367 - protein, 9 aa, Artificial sequence
  BIIB-9-578 VL-CDR3
QQANFLPFT

SEQ ID NO: 1368 - protein, 9 aa, Artificial sequence
  BIIB-9-631 VL-CDR3
QQRTSFPLT

SEQ ID NO: 1369 - protein, 9 aa, Artificial sequence
  BIIB-9-612 VL-CDR3
QQSSLFPLT

SEQ ID NO: 1370 - protein, 9 aa, Artificial sequence
  BIIB-12-891 VH-CDR1
YTFTSYYIH

SEQ ID NO: 1371 - protein, 9 aa, Artificial sequence
  BIIB-12-892 VH-CDR1
YTFTSYYMH

SEQ ID NO: 1372 - protein, 9 aa, Artificial sequence
  BIIB-12-893 VH-CDR1
YTFTSYYMV

SEQ ID NO: 1373 - protein, 9 aa, Artificial sequence
  BIIB-12-895 VH-CDR1
YTFTSYYMH

SEQ ID NO: 1374 - protein, 9 aa, Artificial sequence
  BIIB-12-896 VH-CDR1
YTFTSYYMH

SEQ ID NO: 1375 - protein, 11 aa, Artificial sequence
  BIIB-12-897 VH-CDR1
GSISSSSYYWG

SEQ ID NO: 1376 - protein, 9 aa, Artificial sequence
  BIIB-12-898 VH-CDR1
YTFTSYYMH

SEQ ID NO: 1377 - protein, 9 aa, Artificial sequence
  BIIB-12-899 VH-CDR1
YTFTSYYMH

SEQ ID NO: 1378 - protein, 9 aa, Artificial sequence
  BIIB-12-900 VH-CDR1
YTFTSYYMH

SEQ ID NO: 1379 - protein, 9 aa, Artificial sequence
  BIIB-12-901 VH-CDR1
YTFTSYYMS

SEQ ID NO: 1380 - protein, 9 aa, Artificial sequence
  BIIB-12-902 VH-CDR1
YTFTSYYMH

SEQ ID NO: 1381 - protein, 9 aa, Artificial sequence
  BIIB-12-903 VH-CDR1
YTFTSYYMH

SEQ ID NO: 1382 - protein, 9 aa, Artificial sequence
  BIIB-12-904 VH-CDR1
FTFSSYGMH

SEQ ID NO: 1383 - protein, 9 aa, Artificial sequence
  BIIB-12-905 VH-CDR1
FTFSSYGMH

SEQ ID NO: 1384 - protein, 9 aa, Artificial sequence
  BIIB-12-906 VH-CDR1
FTFSSYGMH

SEQ ID NO: 1385 - protein, 10 aa, Artificial sequence
  BIIB-12-907 VH-CDR1
YSISSGYYWA

SEQ ID NO: 1386 - protein, 9 aa, Artificial sequence
  BIIB-12-908 VH-CDR1
FTFSSYGMH

SEQ ID NO: 1387 - protein, 9 aa, Artificial sequence
  BIIB-12-909 VH-CDR1
FTFSSYGMH

SEQ ID NO: 1388 - protein, 11 aa, Artificial sequence
  BIIB-12-910 VH-CDR1
GSISSGGYYWS

SEQ ID NO: 1389 - protein, 9 aa, Artificial sequence
  BIIB-12-911 VH-CDR1
FTFSSYGMH

SEQ ID NO: 1390 - protein, 9 aa, Artificial sequence
  BIIB-12-912 VH-CDR1
FTFSSYGMH

SEQ ID NO: 1391 - protein, 9 aa, Artificial sequence
  BIIB-12-913 VH-CDR1
YTFTSYGIS

SEQ ID NO: 1392 - protein, 9 aa, Artificial sequence
  BIIB-12-914 VH-CDR1
YTFTSYYMH

SEQ ID NO: 1393 - protein, 11 aa, Artificial sequence
  BIIB-12-915 VH-CDR1
GSISSSRYYWG

SEQ ID NO: 1394 - protein, 9 aa, Artificial sequence
  BIIB-12-916 VH-CDR1
YTFTSYYMH

SEQ ID NO: 1395 - protein, 9 aa, Artificial sequence
  BIIB-12-917 VH-CDR1
YSFTTYWIG

SEQ ID NO: 1396 - protein, 9 aa, Artificial sequence
  BIIB-12-918 VH-CDR1
FTFSSYGMH

SEQ ID NO: 1397 - protein, 9 aa, Artificial sequence
  BIIB-12-919 VH-CDR1
YTFTSYYMH

SEQ ID NO: 1398 - protein, 9 aa, Artificial sequence
  BIIB-12-920 VH-CDR1
YTFTSYGIS

SEQ ID NO: 1399 - protein, 9 aa, Artificial sequence
  BIIB-12-921 VH-CDR1
FTFSSYGMH

SEQ ID NO: 1400 - protein, 9 aa, Artificial sequence
  BIIB-12-922 VH-CDR1
YTFTSYYMH

SEQ ID NO: 1401 - protein, 9 aa, Artificial sequence
  BIIB-12-923 VH-CDR1
YTFTSYYMH

SEQ ID NO: 1402 - protein, 9 aa, Artificial sequence
  BIIB-12-924 VH-CDR1
FTFSSYGMH

SEQ ID NO: 1403 - protein, 9 aa, Artificial sequence
  BIIB-12-926 VH-CDR1
YTFTSYYMH

SEQ ID NO: 1404 - protein, 9 aa, Artificial sequence
  BIIB-12-927 VH-CDR1
YTFTSYYMS

SEQ ID NO: 1405 - protein, 9 aa, Artificial sequence
  BIIB-12-928 VH-CDR1
FTFSSYGMH

SEQ ID NO: 1406 - protein, 9 aa, Artificial sequence
  BIIB-12-929 VH-CDR1
YTFTSYYMH

SEQ ID NO: 1407 - protein, 9 aa, Artificial sequence
  BIIB-12-930 VH-CDR1
YTFTSYYMH

SEQ ID NO: 1408 - protein, 9 aa, Artificial sequence
  BIIB-12-931 VH-CDR1
YTFTSYYMS

SEQ ID NO: 1409 - protein, 9 aa, Artificial sequence
  BIIB-12-932 VH-CDR1
FTFSSYGMH

SEQ ID NO: 1410 - protein, 9 aa, Artificial sequence
  BIIB-12-933 VH-CDR1
FTFSSYGMH

SEQ ID NO: 1411 - protein, 9 aa, Artificial sequence
  BIIB-12-934 VH-CDR1
FTFSSYGMH

SEQ ID NO: 1412 - protein, 9 aa, Artificial sequence
  BIIB-12-935 VH-CDR1
FTFSSYGMH

SEQ ID NO: 1413 - protein, 9 aa, Artificial sequence
  BIIB-12-936 VH-CDR1
FTFSSYAMS

SEQ ID NO: 1414 - protein, 9 aa, Artificial sequence
  BIIB-12-937 VH-CDR1
YTFTSYYMH

SEQ ID NO: 1415 - protein, 9 aa, Artificial sequence
  BIIB-12-1288 VH-CDR1
YTFTSYYMH

SEQ ID NO: 1416 - protein, 9 aa, Artificial sequence
  BIIB-12-1289 VH-CDR1
YTFTSYYMH

SEQ ID NO: 1417 - protein, 9 aa, Artificial sequence
  BIIB-12-1290 VH-CDR1
YTFTSYYMH

SEQ ID NO: 1418 - protein, 9 aa, Artificial sequence
  BIIB-12-1291 VH-CDR1
YTFTSYYMH

SEQ ID NO: 1419 - protein, 9 aa, Artificial sequence
  BIIB-12-1292 VH-CDR1
YTFTSYYIH

SEQ ID NO: 1420 - protein, 9 aa, Artificial sequence
  BIIB-12-1293 VH-CDR1
YTFTSYYMH

SEQ ID NO: 1421 - protein, 9 aa, Artificial sequence
  BIIB-12-1294 VH-CDR1
YTFTSYYMH

SEQ ID NO: 1422 - protein, 9 aa, Artificial sequence
  BIIB-12-1295 VH-CDR1
YTFTSYYMV

SEQ ID NO: 1423 - protein, 9 aa, Artificial sequence
  BIIB-12-1296 VH-CDR1
FTFSTYAMS

SEQ ID NO: 1424 - protein, 9 aa, Artificial sequence
  BIIB-12-1297 VH-CDR1
FTFSSYGMH

SEQ ID NO: 1425 - protein, 9 aa, Artificial sequence
  BIIB-12-1298 VH-CDR1
FTFSSYGMH

SEQ ID NO: 1426 - protein, 9 aa, Artificial sequence
  BIIB-12-1299 VH-CDR1
FTFSSYGMH

SEQ ID NO: 1427 - protein, 9 aa, Artificial sequence
  BIIB-12-1300 VH-CDR1
FTFSSYGMH

SEQ ID NO: 1428 - protein, 9 aa, Artificial sequence
  BIIB-12-1301 VH-CDR1
FTFSSYGMH

SEQ ID NO: 1429 - protein, 9 aa, Artificial sequence
  BIIB-12-1302 VH-CDR1
YTFTNYGIS

SEQ ID NO: 1430 - protein, 9 aa, Artificial sequence
  BIIB-12-1303 VH-CDR1
FTFSSYGMH

SEQ ID NO: 1431 - protein, 9 aa, Artificial sequence
  BIIB-12-1304 VH-CDR1
FTFSSYGMH

SEQ ID NO: 1432 - protein, 9 aa, Artificial sequence
  BIIB-12-1305 VH-CDR1
FTFSSYGMH

SEQ ID NO: 1433 - protein, 11 aa, Artificial sequence
  BIIB-12-1306 VH-CDR1
GSISSGGYYWS

SEQ ID NO: 1434 - protein, 10 aa, Artificial sequence
  BIIB-12-1307 VH-CDR1
YSISSGYYWA

SEQ ID NO: 1435 - protein, 9 aa, Artificial sequence
  BIIB-12-1308 VH-CDR1
FTFSSYGMH

SEQ ID NO: 1436 - protein, 9 aa, Artificial sequence
  BIIB-12-1309 VH-CDR1
FTFSSYGMH

SEQ ID NO: 1437 - protein, 9 aa, Artificial sequence
  BIIB-12-1310 VH-CDR1
FTFSSYSMN

SEQ ID NO: 1438 - protein, 9 aa, Artificial sequence
  BIIB-12-1311 VH-CDR1
FTFSSYGMH

SEQ ID NO: 1439 - protein, 9 aa, Artificial sequence
  BIIB-12-1312 VH-CDR1
FTFSSYGMH

SEQ ID NO: 1440 - protein, 9 aa, Artificial sequence
  BIIB-12-1313 VH-CDR1
FTFSSYGMH

SEQ ID NO: 1441 - protein, 9 aa, Artificial sequence
  BIIB-12-1314 VH-CDR1
FTFSSYGMH

SEQ ID NO: 1442 - protein, 9 aa, Artificial sequence
  BIIB-12-1315 VH-CDR1
YTFTSYYMV

SEQ ID NO: 1443 - protein, 9 aa, Artificial sequence
  BIIB-12-1316 VH-CDR1
FTFSSYGMH

SEQ ID NO: 1444 - protein, 9 aa, Artificial sequence
  BIIB-12-1317 VH-CDR1
FTFSSYGMH

SEQ ID NO: 1445 - protein, 9 aa, Artificial sequence
  BIIB-12-1318 VH-CDR1
FTFSSYGMH

SEQ ID NO: 1446 - protein, 9 aa, Artificial sequence
  BIIB-12-1319 VH-CDR1
FTFSSYGMH

SEQ ID NO: 1447 - protein, 9 aa, Artificial sequence
  BIIB-12-1322 VH-CDR1
YTFTSYYIH

SEQ ID NO: 1448 - protein, 9 aa, Artificial sequence
  BIIB-12-1323 VH-CDR1
YTFTSYYIH

SEQ ID NO: 1449 - protein, 9 aa, Artificial sequence
  BIIB-12-1324 VH-CDR1
YTFTSYYMV

SEQ ID NO: 1450 - protein, 9 aa, Artificial sequence
  BIIB-12-1325 VH-CDR1
YTFTSYYMV

SEQ ID NO: 1451 - protein, 9 aa, Artificial sequence
  BIIB-12-1326 VH-CDR1
FTFSSYAMS

SEQ ID NO: 1452 - protein, 9 aa, Artificial sequence
  BIIB-12-1327 VH-CDR1
FTFSSYGMH

SEQ ID NO: 1453 - protein, 11 aa, Artificial sequence
  BIIB-12-1328 VH-CDR1
GSISSSSYYWG

SEQ ID NO: 1454 - protein, 9 aa, Artificial sequence
  BIIB-12-1329 VH-CDR1
FTFSSYGMH

SEQ ID NO: 1455 - protein, 9 aa, Artificial sequence
  BIIB-12-1330 VH-CDR1
FTFSSYGMH

SEQ ID NO: 1456 - protein, 9 aa, Artificial sequence
  BIIB-12-1331 VH-CDR1
FTFSSYGMH

SEQ ID NO: 1457 - protein, 9 aa, Artificial sequence
  BIIB-12-1332 VH-CDR1
YTFTSYYMS

SEQ ID NO: 1458 - protein, 9 aa, Artificial sequence
  BIIB-12-1333 VH-CDR1
YTFTSYYMV

SEQ ID NO: 1459 - protein, 9 aa, Artificial sequence
  BIIB-12-1334 VH-CDR1
FTFSSYGMH

SEQ ID NO: 1460 - protein, 17 aa, Artificial sequence
  BIIB-12-891 VH-CDR2
IINPSGGSTSYAQKFQG

SEQ ID NO: 1461 - protein, 17 aa, Artificial sequence
  BIIB-12-892 VH-CDR2
IINPSGGSTSYAQKFQG

SEQ ID NO: 1462 - protein, 17 aa, Artificial sequence
  BIIB-12-893 VH-CDR2
IINPSGGSTSYAQKFQG

SEQ ID NO: 1463 - protein, 17 aa, Artificial sequence
  BIIB-12-895 VH-CDR2
IINPSGGSTSYAQKFQG

SEQ ID NO: 1464 - protein, 17 aa, Artificial sequence
  BIIB-12-896 VH-CDR2
IINPSGGSTSYAQKFQG

SEQ ID NO: 1465 - protein, 16 aa, Artificial sequence
  BIIB-12-897 VH-CDR2
SIYYSGSTYYNPSLKS

SEQ ID NO: 1466 - protein, 17 aa, Artificial sequence
  BIIB-12-898 VH-CDR2
IINPSGGSTTYAQKFQG

SEQ ID NO: 1467 - protein, 17 aa, Artificial sequence
  BIIB-12-899 VH-CDR2
IINPSGGSTSYAQKFQG

SEQ ID NO: 1468 - protein, 17 aa, Artificial sequence
  BIIB-12-900 VH-CDR2
IINPGGGSTSYAQKFQG

SEQ ID NO: 1469 - protein, 17 aa, Artificial sequence
  BIIB-12-901 VH-CDR2
IINPSGGSTSYAQKFQG

SEQ ID NO: 1470 - protein, 17 aa, Artificial sequence
  BIIB-12-902 VH-CDR2
IINPGGGSTSYAQKFQG

SEQ ID NO: 1471 - protein, 17 aa, Artificial sequence
  BIIB-12-903 VH-CDR2
IINPSGGSTSYAQKFQG

SEQ ID NO: 1472 - protein, 17 aa, Artificial sequence
  BIIB-12-904 VH-CDR2
VISYDGSNKYYADSVKG

SEQ ID NO: 1473 - protein, 17 aa, Artificial sequence
  BIIB-12-905 VH-CDR2
VISYDGSNKYYADSVKG

SEQ ID NO: 1474 - protein, 17 aa, Artificial sequence
  BIIB-12-906 VH-CDR2
VISYDGSNKYYADSVKG

SEQ ID NO: 1475 - protein, 16 aa, Artificial sequence
  BIIB-12-907 VH-CDR2
SIYHSGSTYYNPSLKS

SEQ ID NO: 1476 - protein, 17 aa, Artificial sequence
  BIIB-12-908 VH-CDR2
VISYDGSNKYYADSVKG

SEQ ID NO: 1477 - protein, 17 aa, Artificial sequence
  BIIB-12-909 VH-CDR2
VISYDGSNKYYADSVKG

SEQ ID NO: 1478 - protein, 16 aa, Artificial sequence
  BIIB-12-910 VH-CDR2
SIYYSGSTYYNPSLKS

SEQ ID NO: 1479 - protein, 17 aa, Artificial sequence
  BIIB-12-911 VH-CDR2
VISYDGSNKYYADSVKG

SEQ ID NO: 1480 - protein, 17 aa, Artificial sequence
  BIIB-12-912 VH-CDR2
VISYDGSNKYYADSVKG

SEQ ID NO: 1481 - protein, 17 aa, Artificial sequence
  BIIB-12-913 VH-CDR2
WISAYNGNTNYAQKLQG

SEQ ID NO: 1482 - protein, 17 aa, Artificial sequence
  BIIB-12-914 VH-CDR2
IINPSGGSTSYAQKFQG

SEQ ID NO: 1483 - protein, 16 aa, Artificial sequence
  BIIB-12-915 VH-CDR2
SIYYSGSTYYNPSLKS

SEQ ID NO: 1484 - protein, 17 aa, Artificial sequence
  BIIB-12-916 VH-CDR2
IINPSGGSTSYAQKFQG

SEQ ID NO: 1485 - protein, 17 aa, Artificial sequence
  BIIB-12-917 VH-CDR2
IIYPGDSDTRYSPSFQG

SEQ ID NO: 1486 - protein, 17 aa, Artificial sequence
  BIIB-12-918 VH-CDR2
VISYDGSNKYYADSVKG

SEQ ID NO: 1487 - protein, 17 aa, Artificial sequence
  BIIB-12-919 VH-CDR2
VINPSGGSTSYAQKFQG

SEQ ID NO: 1488 - protein, 17 aa, Artificial sequence
  BIIB-12-920 VH-CDR2
WISPYNGNTNYAQKLQG

SEQ ID NO: 1489 - protein, 17 aa, Artificial sequence
  BIIB-12-921 VH-CDR2
VISYDGSNKYYADSVKG

SEQ ID NO: 1490 - protein, 17 aa, Artificial sequence
  BIIB-12-922 VH-CDR2
IINPSGGSTSYAQKFQG

SEQ ID NO: 1491 - protein, 17 aa, Artificial sequence
  BIIB-12-923 VH-CDR2
IINPSGGSTSYAQKFQG

SEQ ID NO: 1492 - protein, 17 aa, Artificial sequence
  BIIB-12-924 VH-CDR2
VISYDGSNKYYADSVKG

SEQ ID NO: 1493 - protein, 17 aa, Artificial sequence
  BIIB-12-926 VH-CDR2
IINPSGGSTSYAQKFQG

SEQ ID NO: 1494 - protein, 17 aa, Artificial sequence
  BIIB-12-927 VH-CDR2
IINPSGGSTSYAQKFQG

SEQ ID NO: 1495 - protein, 17 aa, Artificial sequence
  BIIB-12-928 VH-CDR2
VISYDGSNKYYADSVKG

SEQ ID NO: 1496 - protein, 17 aa, Artificial sequence
  BIIB-12-929 VH-CDR2
IINPSGGSTSYAQKFQG

SEQ ID NO: 1497 - protein, 17 aa, Artificial sequence
  BIIB-12-930 VH-CDR2
IINPSGGSTSYAQKFQG

SEQ ID NO: 1498 - protein, 17 aa, Artificial sequence
  BIIB-12-931 VH-CDR2
IINPSGGSTSYAQKFQG

SEQ ID NO: 1499 - protein, 17 aa, Artificial sequence
  BIIB-12-932 VH-CDR2
VISYDGSNKYYADSVKG

SEQ ID NO: 1500 - protein, 17 aa, Artificial sequence
  BIIB-12-933 VH-CDR2
VISYDGSNKYYADSVKG

SEQ ID NO: 1501 - protein, 17 aa, Artificial sequence
  BIIB-12-934 VH-CDR2
VISYDGSNKYYADSVKG

SEQ ID NO: 1502 - protein, 17 aa, Artificial sequence
  BIIB-12-935 VH-CDR2
VISYDGSNKYYADSVKG

SEQ ID NO: 1503 - protein, 17 aa, Artificial sequence
  BIIB-12-936 VH-CDR2
AISGSGGSTYYADSVKG

SEQ ID NO: 1504 - protein, 17 aa, Artificial sequence
  BIIB-12-937 VH-CDR2
IINPSGGSTSYAQKFQG

SEQ ID NO: 1505 - protein, 17 aa, Artificial sequence
  BIIB-12-1288 VH-CDR2
IINPSGGSTSYAQKFQG

SEQ ID NO: 1506 - protein, 17 aa, Artificial sequence
  BIIB-12-1289 VH-CDR2
IINPGGGSTSYAQKFQG

SEQ ID NO: 1507 - protein, 17 aa, Artificial sequence
  BIIB-12-1290 VH-CDR2
IINPGGGSTSYAQKFQG

SEQ ID NO: 1508 - protein, 17 aa, Artificial sequence
  BIIB-12-1291 VH-CDR2
IINPSGGSTSYAQKFQG

SEQ ID NO: 1509 - protein, 17 aa, Artificial sequence
  BIIB-12-1292 VH-CDR2
IINPSGGSTSYAQKFQG

SEQ ID NO: 1510 - protein, 17 aa, Artificial sequence
  BIIB-12-1293 VH-CDR2
IINPSGGSTSYAQKFQG

SEQ ID NO: 1511 - protein, 17 aa, Artificial sequence
  BIIB-12-1294 VH-CDR2
IINPSGGSTSYAQKFQG

SEQ ID NO: 1512 - protein, 17 aa, Artificial sequence
  BIIB-12-1295 VH-CDR2
IINPSGGSTSYAQKFQG

SEQ ID NO: 1513 - protein, 17 aa, Artificial sequence
  BIIB-12-1296 VH-CDR2
AISGSGGSTYYADSVKG

SEQ ID NO: 1514 - protein, 17 aa, Artificial sequence
  BIIB-12-1297 VH-CDR2
VISYDGSNKYYADSVKG

SEQ ID NO: 1515 - protein, 17 aa, Artificial sequence
  BIIB-12-1298 VH-CDR2
VISYDGSNKYYADSVKG

SEQ ID NO: 1516 - protein, 17 aa, Artificial sequence
  BIIB-12-1299 VH-CDR2
VISYDGSNKYYADSVKG

SEQ ID NO: 1517 - protein, 17 aa, Artificial sequence
  BIIB-12-1300 VH-CDR2
VISYDGSNKYYADSVKG

SEQ ID NO: 1518 - protein, 17 aa, Artificial sequence
  BIIB-12-1301 VH-CDR2
VISYDGSNKYYADSVKG

SEQ ID NO: 1519 - protein, 17 aa, Artificial sequence
  BIIB-12-1302 VH-CDR2
WISAYNGNTNYAQKLQG

SEQ ID NO: 1520 - protein, 17 aa, Artificial sequence
  BIIB-12-1303 VH-CDR2
VISYDGSNKYYADSVKG

SEQ ID NO: 1521 - protein, 17 aa, Artificial sequence
  BIIB-12-1304 VH-CDR2
VISYDGSNKYYADSVKG

SEQ ID NO: 1522 - protein, 17 aa, Artificial sequence
  BIIB-12-1305 VH-CDR2
VISYDGSNKYYADSVKG

SEQ ID NO: 1523 - protein, 16 aa, Artificial sequence
  BIIB-12-1306 VH-CDR2
SIYYSGSTYYNPSLKS

SEQ ID NO: 1524 - protein, 16 aa, Artificial sequence
  BIIB-12-1307 VH-CDR2
SIYHSGSTYYNPSLKS

SEQ ID NO: 1525 - protein, 17 aa, Artificial sequence
  BIIB-12-1308 VH-CDR2
VISYDGSNKYYADSVKG

SEQ ID NO: 1526 - protein, 17 aa, Artificial sequence
  BIIB-12-1309 VH-CDR2
VISYDGSNKYYADSVKG

SEQ ID NO: 1527 - protein, 17 aa, Artificial sequence
  BIIB-12-1310 VH-CDR2
SISSSSSYIYYADSVKG

SEQ ID NO: 1528 - protein, 17 aa, Artificial sequence
  BIIB-12-1311 VH-CDR2
VISYDGSNKYYADSVKG

SEQ ID NO: 1529 - protein, 17 aa, Artificial sequence
  BIIB-12-1312 VH-CDR2
VISYDGSNKYYADSVKG

SEQ ID NO: 1530 - protein, 17 aa, Artificial sequence
  BIIB-12-1313 VH-CDR2
VISYDGSNKYYADSVKG

SEQ ID NO: 1531 - protein, 17 aa, Artificial sequence
  BIIB-12-1314 VH-CDR2
VISYDGSNKYYADSVKG

SEQ ID NO: 1532 - protein, 17 aa, Artificial sequence
  BIIB-12-1315 VH-CDR2
IINPSGGSTSYAQKFQG

SEQ ID NO: 1533 - protein, 17 aa, Artificial sequence
  BIIB-12-1316 VH-CDR2
VISYDGSNKYYADSVKG

SEQ ID NO: 1534 - protein, 17 aa, Artificial sequence
  BIIB-12-1317 VH-CDR2
VISYDGSNKYYADSVKG

SEQ ID NO: 1535 - protein, 17 aa, Artificial sequence
  BIIB-12-1318 VH-CDR2
VISYDGSNKYYADSVKG

SEQ ID NO: 1536 - protein, 17 aa, Artificial sequence
  BIIB-12-1319 VH-CDR2
VISYDGSNKYYADSVKG

SEQ ID NO: 1537 - protein, 17 aa, Artificial sequence
  BIIB-12-1322 VH-CDR2
IINPSGGSTSYAQKFQG

SEQ ID NO: 1538 - protein, 17 aa, Artificial sequence
  BIIB-12-1323 VH-CDR2
IINPSGGSTSYAQKFQG

SEQ ID NO: 1539 - protein, 17 aa, Artificial sequence
  BIIB-12-1324 VH-CDR2
IINPSGGSTSYAQKFQG

SEQ ID NO: 1540 - protein, 17 aa, Artificial sequence
  BIIB-12-1325 VH-CDR2
IINPSGGSTSYAQKFQG

SEQ ID NO: 1541 - protein, 17 aa, Artificial sequence
  BIIB-12-1326 VH-CDR2
TISGSGGSTYYADSVKG

SEQ ID NO: 1542 - protein, 17 aa, Artificial sequence
  BIIB-12-1327 VH-CDR2
VISYDGSNKYYADSVKG

SEQ ID NO: 1543 - protein, 16 aa, Artificial sequence
  BIIB-12-1328 VH-CDR2
SIYYSGSTYYNPSLKS

SEQ ID NO: 1544 - protein, 17 aa, Artificial sequence
  BIIB-12-1329 VH-CDR2
VISYDGSNKYYADSVKG

SEQ ID NO: 1545 - protein, 17 aa, Artificial sequence
  BIIB-12-1330 VH-CDR2
VISYDGSNKYYADSVKG

SEQ ID NO: 1546 - protein, 17 aa, Artificial sequence
  BIIB-12-1331 VH-CDR2
VISYDGSNKYYADSVKG

SEQ ID NO: 1547 - protein, 17 aa, Artificial sequence
  BIIB-12-1332 VH-CDR2
IINPSGGSTSYAQKFQG

SEQ ID NO: 1548 - protein, 17 aa, Artificial sequence
  BIIB-12-1333 VH-CDR2
IINPSGGSTSYAQKFQG

SEQ ID NO: 1549 - protein, 17 aa, Artificial sequence
  BIIB-12-1334 VH-CDR2
VISYDGSNKYYADSVKG

SEQ ID NO: 1550 - protein, 14 aa, Artificial sequence
  BIIB-12-891 VH-CDR3
ARASIYRGLGAFDI

SEQ ID NO: 1551 - protein, 14 aa, Artificial sequence
  BIIB-12-892 VH-CDR3
ARGLGRRTPTAFDI

SEQ ID NO: 1552 - protein, 16 aa, Artificial sequence
  BIIB-12-893 VH-CDR3
ARDPGRRQYSFYGMDV

SEQ ID NO: 1553 - protein, 13 aa, Artificial sequence
  BIIB-12-895 VH-CDR3
ARGGGYKSRGIDY

SEQ ID NO: 1554 - protein, 13 aa, Artificial sequence
  BIIB-12-896 VH-CDR3
ARGLGQQRRGFDI

SEQ ID NO: 1555 - protein, 14 aa, Artificial sequence
  BIIB-12-897 VH-CDR3
AREGRTYYGGWFDP

SEQ ID NO: 1556 - protein, 12 aa, Artificial sequence
  BIIB-12-898 VH-CDR3
ARGDRMLRAFDP

SEQ ID NO: 1557 - protein, 14 aa, Artificial sequence
  BIIB-12-899 VH-CDR3
ARGPRTSSPLYFDL

SEQ ID NO: 1558 - protein, 15 aa, Artificial sequence
  BIIB-12-900 VH-CDR3
ARSGGMYDRELGMDV

SEQ ID NO: 1559 - protein, 15 aa, Artificial sequence
  BIIB-12-901 VH-CDR3
ARSRPRRPSPYGMDV

SEQ ID NO: 1560 - protein, 15 aa, Artificial sequence
  BIIB-12-902 VH-CDR3
ARGGPRRAYSWYFDY

SEQ ID NO: 1561 - protein, 13 aa, Artificial sequence
  BIIB-12-903 VH-CDR3
ARDLGYTAGAFGY

SEQ ID NO: 1562 - protein, 11 aa, Artificial sequence
  BIIB-12-904 VH-CDR3
ARGSGRSGYHY

SEQ ID NO: 1563 - protein, 9 aa, Artificial sequence
  BIIB-12-905 VH-CDR3
AKGGTYLDT

SEQ ID NO: 1564 - protein, 9 aa, Artificial sequence
  BIIB-12-906 VH-CDR3
AKSSRHFDY

SEQ ID NO: 1565 - protein, 11 aa, Artificial sequence
  BIIB-12-907 VH-CDR3
ARESGMSGAAY

SEQ ID NO: 1566 - protein, 9 aa, Artificial sequence
  BIIB-12-908 VH-CDR3
AKGPRGMDV

SEQ ID NO: 1567 - protein, 12 aa, Artificial sequence
  BIIB-12-909 VH-CDR3
AKGKHRRRSFDI

SEQ ID NO: 1568 - protein, 14 aa, Artificial sequence
  BIIB-12-910 VH-CDR3
ARGPLQRQVRYFDL

SEQ ID NO: 1569 - protein, 8 aa, Artificial sequence
  BIIB-12-911 VH-CDR3
ARGRGMDV

SEQ ID NO: 1570 - protein, 11 aa, Artificial sequence
  BIIB-12-912 VH-CDR3
AKSGGRYGYDI

SEQ ID NO: 1571 - protein, 8 aa, Artificial sequence
  BIIB-12-913 VH-CDR3
ARGGVSRF

SEQ ID NO: 1572 - protein, 12 aa, Artificial sequence
  BIIB-12-914 VH-CDR3
ARAPRYRGTMDV

SEQ ID NO: 1573 - protein, 10 aa, Artificial sequence
  BIIB-12-915 VH-CDR3
ARVGGGYANP

SEQ ID NO: 1574 - protein, 14 aa, Artificial sequence
  BIIB-12-916 VH-CDR3
ARGGRQKATRRVDV

SEQ ID NO: 1575 - protein, 13 aa, Artificial sequence
  BIIB-12-917 VH-CDR3
ARGRFRPRGRFDY

SEQ ID NO: 1576 - protein, 11 aa, Artificial sequence
  BIIB-12-918 VH-CDR3
AKSLGGRSFDI

SEQ ID NO: 1577 - protein, 15 aa, Artificial sequence
  BIIB-12-919 VH-CDR3
ARGANIAVGRRYADY

SEQ ID NO: 1578 - protein, 10 aa, Artificial sequence
  BIIB-12-920 VH-CDR3
ARGSGHTTMF

SEQ ID NO: 1579 - protein, 13 aa, Artificial sequence
  BIIB-12-921 VH-CDR3
AKVGDRGTRAFDP

SEQ ID NO: 1580 - protein, 9 aa, Artificial sequence
  BIIB-12-922 VH-CDR3
ARRGRIAGM

SEQ ID NO: 1581 - protein, 13 aa, Artificial sequence
  BIIB-12-923 VH-CDR3
ARGAGYLQRAFDI

SEQ ID NO: 1582 - protein, 12 aa, Artificial sequence
  BIIB-12-924 VH-CDR3
AKGKSSERGLNP

SEQ ID NO: 1583 - protein, 14 aa, Artificial sequence
  BIIB-12-926 VH-CDR3
ARDGRMARGASPDY

SEQ ID NO: 1584 - protein, 14 aa, Artificial sequence
  BIIB-12-927 VH-CDR3
ARDSGRKRYYYMDV

SEQ ID NO: 1585 - protein, 9 aa, Artificial sequence
  BIIB-12-928 VH-CDR3
AKGGTYLDT

SEQ ID NO: 1586 - protein, 12 aa, Artificial sequence
  BIIB-12-929 VH-CDR3
ARDQGYSRSFDI

SEQ ID NO: 1587 - protein, 13 aa, Artificial sequence
  BIIB-12-930 VH-CDR3
ARVRQKATLLFQH

SEQ ID NO: 1588 - protein, 17 aa, Artificial sequence
  BIIB-12-931 VH-CDR3
ARDPVQEYGPYYYYMDV

SEQ ID NO: 1589 - protein, 13 aa, Artificial sequence
  BIIB-12-932 VH-CDR3
ARLGYRGASAFDI

SEQ ID NO: 1590 - protein, 11 aa, Artificial sequence
  BIIB-12-933 VH-CDR3
ARLPRFTGTAY

SEQ ID NO: 1591 - protein, 13 aa, Artificial sequence
  BIIB-12-934 VH-CDR3
ARESGGHSYGMDV

SEQ ID NO: 1592 - protein, 13 aa, Artificial sequence
  BIIB-12-935 VH-CDR3
ARELEYGHYGMDV

SEQ ID NO: 1593 - protein, 14 aa, Artificial sequence
  BIIB-12-936 VH-CDR3
AKDGGWYEAYGMDV

SEQ ID NO: 1594 - protein, 14 aa, Artificial sequence
  BIIB-12-937 VH-CDR3
ARPTRMLRSYGMDV

SEQ ID NO: 1595 - protein, 19 aa, Artificial sequence
  BIIB-12-1288 VH-CDR3
ARGGANDYGSSSRWWYFDL

SEQ ID NO: 1596 - protein, 18 aa, Artificial sequence
  BIIB-12-1289 VH-CDR3
ARGPPRTYATGSHNWFDP

SEQ ID NO: 1597 - protein, 13 aa, Artificial sequence
  BIIB-12-1290 VH-CDR3
AREGGRYVRGMDV

SEQ ID NO: 1598 - protein, 13 aa, Artificial sequence
  BIIB-12-1291 VH-CDR3
ARSRRMWVGYFDL

SEQ ID NO: 1599 - protein, 14 aa, Artificial sequence
  BIIB-12-1292 VH-CDR3
ARDPGRRQSSGFDY

SEQ ID NO: 1600 - protein, 13 aa, Artificial sequence
  BIIB-12-1293 VH-CDR3
ARGSGGKHRGLDV

SEQ ID NO: 1601 - protein, 12 aa, Artificial sequence
  BIIB-12-1294 VH-CDR3
ARGTRSSRDMDV

SEQ ID NO: 1602 - protein, 17 aa, Artificial sequence
  BIIB-12-1295 VH-CDR3
ARVGGATTGKIGYGMDV

SEQ ID NO: 1603 - protein, 15 aa, Artificial sequence
  BIIB-12-1296 VH-CDR3
AKGPPHYYYLWYFDL

SEQ ID NO: 1604 - protein, 14 aa, Artificial sequence
  BIIB-12-1297 VH-CDR3
ARSGGQTHRRSMDV

SEQ ID NO: 1605 - protein, 11 aa, Artificial sequence
  BIIB-12-1298 VH-CDR3
AKGGSDRRVGS

SEQ ID NO: 1606 - protein, 11 aa, Artificial sequence
  BIIB-12-1299 VH-CDR3
ARGGSRRAYVY

SEQ ID NO: 1607 - protein, 9 aa, Artificial sequence
  BIIB-12-1300 VH-CDR3
ARGSKYLHA

SEQ ID NO: 1608 - protein, 12 aa, Artificial sequence
  BIIB-12-1301 VH-CDR3
ARTGNYGRGMPY

SEQ ID NO: 1609 - protein, 12 aa, Artificial sequence
  BIIB-12-1302 VH-CDR3
ARARSDWRAFDI

SEQ ID NO: 1610 - protein, 11 aa, Artificial sequence
  BIIB-12-1303 VH-CDR3
ARGPTSRLFQH

SEQ ID NO: 1611 - protein, 11 aa, Artificial sequence
  BIIB-12-1304 VH-CDR3
AKGPGSRRFDI

SEQ ID NO: 1612 - protein, 13 aa, Artificial sequence
  BIIB-12-1305 VH-CDR3
AKLGGRWSSDFQH

SEQ ID NO: 1613 - protein, 9 aa, Artificial sequence
  BIIB-12-1306 VH-CDR3
ARGAGGSAP

SEQ ID NO: 1614 - protein, 15 aa, Artificial sequence
  BIIB-12-1307 VH-CDR3
ARGPLPRSRGLAFDI

SEQ ID NO: 1615 - protein, 13 aa, Artificial sequence
  BIIB-12-1308 VH-CDR3
ARGPRALGTAFDI

SEQ ID NO: 1616 - protein, 12 aa, Artificial sequence
  BIIB-12-1309 VH-CDR3
ARGRYTSRYFQH

SEQ ID NO: 1617 - protein, 15 aa, Artificial sequence
  BIIB-12-1310 VH-CDR3
ARLGGYGSSQRYFDL

SEQ ID NO: 1618 - protein, 9 aa, Artificial sequence
  BIIB-12-1311 VH-CDR3
AKGRHYWAV

SEQ ID NO: 1619 - protein, 10 aa, Artificial sequence
  BIIB-12-1312 VH-CDR3
AKGMGHWIDY

SEQ ID NO: 1620 - protein, 9 aa, Artificial sequence
  BIIB-12-1313 VH-CDR3
AKGTGWWRY

SEQ ID NO: 1621 - protein, 9 aa, Artificial sequence
  BIIB-12-1314 VH-CDR3
AKGTRWAGN

SEQ ID NO: 1622 - protein, 15 aa, Artificial sequence
  BIIB-12-1315 VH-CDR3
ARGRPSSKRVTYFDY

SEQ ID NO: 1623 - protein, 11 aa, Artificial sequence
  BIIB-12-1316 VH-CDR3
AKSGQYRAFDI

SEQ ID NO: 1624 - protein, 10 aa, Artificial sequence
  BIIB-12-1317 VH-CDR3
ARGVGGHDTR

SEQ ID NO: 1625 - protein, 18 aa, Artificial sequence
  BIIB-12-1318 VH-CDR3
ARKGDYRSGSYSGRAFGI

SEQ ID NO: 1626 - protein, 11 aa, Artificial sequence
  BIIB-12-1319 VH-CDR3
ARTGYHRSVYY

SEQ ID NO: 1627 - protein, 15 aa, Artificial sequence
  BIIB-12-1322 VH-CDR3
ARSRQRHRGDWYFDL

SEQ ID NO: 1628 - protein, 12 aa, Artificial sequence
  BIIB-12-1323 VH-CDR3
ARGRRFPRGLDY

SEQ ID NO: 1629 - protein, 13 aa, Artificial sequence
  BIIB-12-1324 VH-CDR3
ARLPRYSKRGLDV

SEQ ID NO: 1630 - protein, 10 aa, Artificial sequence
  BIIB-12-1325 VH-CDR3
ARGGRYMLDP

SEQ ID NO: 1631 - protein, 15 aa, Artificial sequence
  BIIB-12-1326 VH-CDR3
AKGPLYRRYGYGMDV

SEQ ID NO: 1632 - protein, 15 aa, Artificial sequence
  BIIB-12-1327 VH-CDR3
AKLGLARGGGYGMDV

SEQ ID NO: 1633 - protein, 19 aa, Artificial sequence
  BIIB-12-1328 VH-CDR3
ARDPAYYSGHDYYYYGMDV

SEQ ID NO: 1634 - protein, 12 aa, Artificial sequence
  BIIB-12-1329 VH-CDR3
ARGGAGSRYFQH

SEQ ID NO: 1635 - protein, 11 aa, Artificial sequence
  BIIB-12-1330 VH-CDR3
AKGGSARWINI

SEQ ID NO: 1636 - protein, 11 aa, Artificial sequence
  BIIB-12-1331 VH-CDR3
AKVPHHRGHDY

SEQ ID NO: 1637 - protein, 12 aa, Artificial sequence
  BIIB-12-1332 VH-CDR3
ARLGRKSRVFDI

SEQ ID NO: 1638 - protein, 14 aa, Artificial sequence
  BIIB-12-1333 VH-CDR3
ARVSRRDYPLAFDI

SEQ ID NO: 1639 - protein, 13 aa, Artificial sequence
  BIIB-12-1334 VH-CDR3
ARVPRKQTGHVDY

SEQ ID NO: 1640 - protein, 17 aa, Artificial sequence
  BIIB-12-891 VL-CDR1
KSSQSVLYSSNNKNYLA

SEQ ID NO: 1641 - protein, 11 aa, Artificial sequence
  BIIB-12-892 VL-CDR1
RASQSVSSYLA

SEQ ID NO: 1642 - protein, 11 aa, Artificial sequence
  BIIB-12-893 VL-CDR1
RASQGISSWLA

SEQ ID NO: 1643 - protein, 11 aa, Artificial sequence
  BIIB-12-895 VL-CDR1
RASQGISSWLA

SEQ ID NO: 1644 - protein, 11 aa, Artificial sequence
  BIIB-12-896 VL-CDR1
RASQGISSWLA

SEQ ID NO: 1645 - protein, 12 aa, Artificial sequence
  BIIB-12-897 VL-CDR1
RASQSVSSSYLA

SEQ ID NO: 1646 - protein, 11 aa, Artificial sequence
  BIIB-12-898 VL-CDR1
RASQAISSWLA

SEQ ID NO: 1647 - protein, 17 aa, Artificial sequence
  BIIB-12-899 VL-CDR1
KSSQSVLYSSNNKNYLA

SEQ ID NO: 1648 - protein, 11 aa, Artificial sequence
  BIIB-12-900 VL-CDR1
RASQSISSWLA

SEQ ID NO: 1649 - protein, 11 aa, Artificial sequence
  BIIB-12-901 VL-CDR1
RASQSVSSYLA

SEQ ID NO: 1650 - protein, 17 aa, Artificial sequence
  BIIB-12-902 VL-CDR1
KSSQSVLYSSNNKNYLA

SEQ ID NO: 1651 - protein, 11 aa, Artificial sequence
  BIIB-12-903 VL-CDR1
RASQSVSSYLA

SEQ ID NO: 1652 - protein, 11 aa, Artificial sequence
  BIIB-12-904 VL-CDR1
RASQSVSSNLA

SEQ ID NO: 1653 - protein, 12 aa, Artificial sequence
  BIIB-12-905 VL-CDR1
RASQSVRSSYLA

SEQ ID NO: 1654 - protein, 11 aa, Artificial sequence
  BIIB-12-906 VL-CDR1
RASQSVSSYLA

SEQ ID NO: 1655 - protein, 16 aa, Artificial sequence
  BIIB-12-907 VL-CDR1
RSSQSLLYSNGYNYLD

SEQ ID NO: 1656 - protein, 11 aa, Artificial sequence
  BIIB-12-908 VL-CDR1
RASQGISSWLA

SEQ ID NO: 1657 - protein, 11 aa, Artificial sequence
  BIIB-12-909 VL-CDR1
RASQSVSSYLA

SEQ ID NO: 1658 - protein, 11 aa, Artificial sequence
  BIIB-12-910 VL-CDR1
RASQSISSYLN

SEQ ID NO: 1659 - protein, 11 aa, Artificial sequence
  BIIB-12-911 VL-CDR1
RASQSVSSYLA

SEQ ID NO: 1660 - protein, 11 aa, Artificial sequence
  BIIB-12-912 VL-CDR1
RASQSVSSNLA

SEQ ID NO: 1661 - protein, 11 aa, Artificial sequence
  BIIB-12-913 VL-CDR1
RASQSVSSNLA

SEQ ID NO: 1662 - protein, 11 aa, Artificial sequence
  BIIB-12-914 VL-CDR1
RASQSISSYLN

SEQ ID NO: 1663 - protein, 16 aa, Artificial sequence
  BIIB-12-915 VL-CDR1
RSSQSLLHSNGYNYLD

SEQ ID NO: 1664 - protein, 11 aa, Artificial sequence
  BIIB-12-916 VL-CDR1
RASQSISSYLN

SEQ ID NO: 1665 - protein, 11 aa, Artificial sequence
  BIIB-12-917 VL-CDR1
RASQSVSSNLA

SEQ ID NO: 1666 - protein, 11 aa, Artificial sequence
  BIIB-12-918 VL-CDR1
RASQSISRYLN

SEQ ID NO: 1667 - protein, 11 aa, Artificial sequence
  BIIB-12-919 VL-CDR1
RASQSISSWLA

SEQ ID NO: 1668 - protein, 11 aa, Artificial sequence
  BIIB-12-920 VL-CDR1
RASQSVSSNLA

SEQ ID NO: 1669 - protein, 11 aa, Artificial sequence
  BIIB-12-921 VL-CDR1
RASQGISRWLA

SEQ ID NO: 1670 - protein, 16 aa, Artificial sequence
  BIIB-12-922 VL-CDR1
RSSQSLLHSNGYNYLD

SEQ ID NO: 1671 - protein, 11 aa, Artificial sequence
  BIIB-12-923 VL-CDR1
RASQSISSWLA

SEQ ID NO: 1672 - protein, 11 aa, Artificial sequence
  BIIB-12-924 VL-CDR1
RASQGISSWLA

SEQ ID NO: 1673 - protein, 11 aa, Artificial sequence
  BIIB-12-926 VL-CDR1
RASQSVSSNLA

SEQ ID NO: 1674 - protein, 11 aa, Artificial sequence
  BIIB-12-927 VL-CDR1
RASQSVSSNLA

SEQ ID NO: 1675 - protein, 12 aa, Artificial sequence
  BIIB-12-928 VL-CDR1
RASQSVRSSYLA

SEQ ID NO: 1676 - protein, 17 aa, Artificial sequence
  BIIB-12-929 VL-CDR1
KSSQSVLYSSNNKNYLA

SEQ ID NO: 1677 - protein, 17 aa, Artificial sequence
  BIIB-12-930 VL-CDR1
KSSQSVLFSSNNKNYLA

SEQ ID NO: 1678 - protein, 11 aa, Artificial sequence
  BIIB-12-931 VL-CDR1
RASQSVSSNLA

SEQ ID NO: 1679 - protein, 11 aa, Artificial sequence
  BIIB-12-932 VL-CDR1
RASQSISSYLN

SEQ ID NO: 1680 - protein, 12 aa, Artificial sequence
  BIIB-12-933 VL-CDR1
RASQSVSSSYLA

SEQ ID NO: 1681 - protein, 11 aa, Artificial sequence
  BIIB-12-934 VL-CDR1
RASQSVSSNLA

SEQ ID NO: 1682 - protein, 12 aa, Artificial sequence
  BIIB-12-935 VL-CDR1
RASQSVSSSFLA

SEQ ID NO: 1683 - protein, 11 aa, Artificial sequence
  BIIB-12-936 VL-CDR1
RASQSVSSNLA

SEQ ID NO: 1684 - protein, 16 aa, Artificial sequence
  BIIB-12-937 VL-CDR1
RSSQSLLHSNGYNYLD

SEQ ID NO: 1685 - protein, 17 aa, Artificial sequence
  BIIB-12-1288 VL-CDR1
KSSQSVLYSSNNKNYLA

SEQ ID NO: 1686 - protein, 17 aa, Artificial sequence
  BIIB-12-1289 VL-CDR1
KSSQSVLYSSNNKNYLA

SEQ ID NO: 1687 - protein, 11 aa, Artificial sequence
  BIIB-12-1290 VL-CDR1
RASQGISSWLA

SEQ ID NO: 1688 - protein, 11 aa, Artificial sequence
  BIIB-12-1291 VL-CDR1
RASQSVSSYLA

SEQ ID NO: 1689 - protein, 11 aa, Artificial sequence
  BIIB-12-1292 VL-CDR1
RASQSVSSYLA

SEQ ID NO: 1690 - protein, 11 aa, Artificial sequence
  BIIB-12-1293 VL-CDR1
RASQGISSWLA

SEQ ID NO: 1691 - protein, 11 aa, Artificial sequence
  BIIB-12-1294 VL-CDR1
RASQSISSWLA

SEQ ID NO: 1692 - protein, 11 aa, Artificial sequence
  BIIB-12-1295 VL-CDR1
RASQGISSWLA

SEQ ID NO: 1693 - protein, 12 aa, Artificial sequence
  BIIB-12-1296 VL-CDR1
RASQSVSSSYLA

SEQ ID NO: 1694 - protein, 11 aa, Artificial sequence
  BIIB-12-1297 VL-CDR1
RASQSVSRYLA

SEQ ID NO: 1695 - protein, 11 aa, Artificial sequence
  BIIB-12-1298 VL-CDR1
RASQGISSWLA

SEQ ID NO: 1696 - protein, 11 aa, Artificial sequence
  BIIB-12-1299 VL-CDR1
RASQSVSSNLA

SEQ ID NO: 1697 - protein, 11 aa, Artificial sequence
  BIIB-12-1300 VL-CDR1
RASQGISSWLA

SEQ ID NO: 1698 - protein, 11 aa, Artificial sequence
  BIIB-12-1301 VL-CDR1
RASQSVSSYLA

SEQ ID NO: 1699 - protein, 11 aa, Artificial sequence
  BIIB-12-1302 VL-CDR1
RASQSVSSNLA

SEQ ID NO: 1700 - protein, 11 aa, Artificial sequence
  BIIB-12-1303 VL-CDR1
RASQSISSYLN

SEQ ID NO: 1701 - protein, 11 aa, Artificial sequence
  BIIB-12-1304 VL-CDR1
RASQSVSSNLA

SEQ ID NO: 1702 - protein, 11 aa, Artificial sequence
  BIIB-12-1305 VL-CDR1
RASQSVSSYLA

SEQ ID NO: 1703 - protein, 17 aa, Artificial sequence
  BIIB-12-1306 VL-CDR1
KSSQSVLYSSNNKNYLA

SEQ ID NO: 1704 - protein, 11 aa, Artificial sequence
  BIIB-12-1307 VL-CDR1
RASQSISSFLN

SEQ ID NO: 1705 - protein, 12 aa, Artificial sequence
  BIIB-12-1308 VL-CDR1
RASQSVSSDYLA

SEQ ID NO: 1706 - protein, 11 aa, Artificial sequence
  BIIB-12-1309 VL-CDR1
RASQGISSWLA

SEQ ID NO: 1707 - protein, 11 aa, Artificial sequence
  BIIB-12-1310 VL-CDR1
RASQSVSRYLA

SEQ ID NO: 1708 - protein, 11 aa, Artificial sequence
  BIIB-12-1311 VL-CDR1
RASQSVSSYLA

SEQ ID NO: 1709 - protein, 11 aa, Artificial sequence
  BIIB-12-1312 VL-CDR1
RASQGISSWLA

SEQ ID NO: 1710 - protein, 11 aa, Artificial sequence
  BIIB-12-1313 VL-CDR1
RASQSVSSNLA

SEQ ID NO: 1711 - protein, 11 aa, Artificial sequence
  BIIB-12-1314 VL-CDR1
RASQGISSWLA

SEQ ID NO: 1712 - protein, 11 aa, Artificial sequence
  BIIB-12-1315 VL-CDR1
RASQSVSSNLA

SEQ ID NO: 1713 - protein, 11 aa, Artificial sequence
  BIIB-12-1316 VL-CDR1
RASQGISSWLA

SEQ ID NO: 1714 - protein, 11 aa, Artificial sequence
  BIIB-12-1317 VL-CDR1
RASQGISSWLA

SEQ ID NO: 1715 - protein, 11 aa, Artificial sequence
  BIIB-12-1318 VL-CDR1
RASQSVSSYLA

SEQ ID NO: 1716 - protein, 11 aa, Artificial sequence
  BIIB-12-1319 VL-CDR1
RASQSVSSNLA

SEQ ID NO: 1717 - protein, 17 aa, Artificial sequence
  BIIB-12-1322 VL-CDR1
KSSQSVLYSSNNKNYLA

SEQ ID NO: 1718 - protein, 11 aa, Artificial sequence
  BIIB-12-1323 VL-CDR1
RASQGISSWLA

SEQ ID NO: 1719 - protein, 11 aa, Artificial sequence
  BIIB-12-1324 VL-CDR1
RASQSVSSYLA

SEQ ID NO: 1720 - protein, 11 aa, Artificial sequence
  BIIB-12-1325 VL-CDR1
RASQSISSWLA

SEQ ID NO: 1721 - protein, 12 aa, Artificial sequence
  BIIB-12-1326 VL-CDR1
RASQSVRSSYLA

SEQ ID NO: 1722 - protein, 11 aa, Artificial sequence
  BIIB-12-1327 VL-CDR1
RASQSVSSNLA

SEQ ID NO: 1723 - protein, 11 aa, Artificial sequence
  BIIB-12-1328 VL-CDR1
RASQSVSSNLA

SEQ ID NO: 1724 - protein, 11 aa, Artificial sequence
  BIIB-12-1329 VL-CDR1
RASQSVSSNLA

SEQ ID NO: 1725 - protein, 11 aa, Artificial sequence
  BIIB-12-1330 VL-CDR1
RASQSISSYLN

SEQ ID NO: 1726 - protein, 11 aa, Artificial sequence
  BIIB-12-1331 VL-CDR1
RASQSVSSYLA

SEQ ID NO: 1727 - protein, 11 aa, Artificial sequence
  BIIB-12-1332 VL-CDR1
RASQGISSWLA

SEQ ID NO: 1728 - protein, 11 aa, Artificial sequence
  BIIB-12-1333 VL-CDR1
RASQSVSSNLA

SEQ ID NO: 1729 - protein, 16 aa, Artificial sequence
  BIIB-12-1334 VL-CDR1
RSSQSLLHSNGYNYLD

SEQ ID NO: 1730 - protein, 7 aa, Artificial sequence
  BIIB-12-891 VL-CDR2
WASTRES

SEQ ID NO: 1731 - protein, 7 aa, Artificial sequence
  BIIB-12-892 VL-CDR2
DASNRAT

SEQ ID NO: 1732 - protein, 7 aa, Artificial sequence
  BIIB-12-893 VL-CDR2
AASSLQS

SEQ ID NO: 1733 - protein, 7 aa, Artificial sequence
  BIIB-12-895 VL-CDR2
AASSLQS

SEQ ID NO: 1734 - protein, 7 aa, Artificial sequence
  BIIB-12-896 VL-CDR2
AASSLQS

SEQ ID NO: 1735 - protein, 7 aa, Artificial sequence
  BIIB-12-897 VL-CDR2
GASSRAT

SEQ ID NO: 1736 - protein, 7 aa, Artificial sequence
  BIIB-12-898 VL-CDR2
DASSLES

SEQ ID NO: 1737 - protein, 7 aa, Artificial sequence
  BIIB-12-899 VL-CDR2
WASTRES

SEQ ID NO: 1738 - protein, 7 aa, Artificial sequence
  BIIB-12-900 VL-CDR2
KASSLES

SEQ ID NO: 1739 - protein, 7 aa, Artificial sequence
  BIIB-12-901 VL-CDR2
DASNRAT

SEQ ID NO: 1740 - protein, 7 aa, Artificial sequence
  BIIB-12-902 VL-CDR2
WASTRES

SEQ ID NO: 1741 - protein, 7 aa, Artificial sequence
  BIIB-12-903 VL-CDR2
DASNRAT

SEQ ID NO: 1742 - protein, 7 aa, Artificial sequence
  BIIB-12-904 VL-CDR2
GASTRAT

SEQ ID NO: 1743 - protein, 7 aa, Artificial sequence
  BIIB-12-905 VL-CDR2
GASSRAT

SEQ ID NO: 1744 - protein, 7 aa, Artificial sequence
  BIIB-12-906 VL-CDR2
DASNRAT

SEQ ID NO: 1745 - protein, 7 aa, Artificial sequence
  BIIB-12-907 VL-CDR2
LGSNRAS

SEQ ID NO: 1746 - protein, 7 aa, Artificial sequence
  BIIB-12-908 VL-CDR2
GASSLQS

SEQ ID NO: 1747 - protein, 7 aa, Artificial sequence
  BIIB-12-909 VL-CDR2
DASNRAT

SEQ ID NO: 1748 - protein, 7 aa, Artificial sequence
  BIIB-12-910 VL-CDR2
AASSLQS

SEQ ID NO: 1749 - protein, 7 aa, Artificial sequence
  BIIB-12-911 VL-CDR2
DASNRAT

SEQ ID NO: 1750 - protein, 7 aa, Artificial sequence
  BIIB-12-912 VL-CDR2
GASTRAT

SEQ ID NO: 1751 - protein, 7 aa, Artificial sequence
  BIIB-12-913 VL-CDR2
GASTRAT

SEQ ID NO: 1752 - protein, 7 aa, Artificial sequence
  BIIB-12-914 VL-CDR2
AASSLQS

SEQ ID NO: 1753 - protein, 7 aa, Artificial sequence
  BIIB-12-915 VL-CDR2
LASNRAS

SEQ ID NO: 1754 - protein, 7 aa, Artificial sequence
  BIIB-12-916 VL-CDR2
AASSLQS

SEQ ID NO: 1755 - protein, 7 aa, Artificial sequence
  BIIB-12-917 VL-CDR2
GASTRAT

SEQ ID NO: 1756 - protein, 7 aa, Artificial sequence
  BIIB-12-918 VL-CDR2
AASSLQS

SEQ ID NO: 1757 - protein, 7 aa, Artificial sequence
  BIIB-12-919 VL-CDR2
KASSLES

SEQ ID NO: 1758 - protein, 7 aa, Artificial sequence
  BIIB-12-920 VL-CDR2
SASTRAT

SEQ ID NO: 1759 - protein, 7 aa, Artificial sequence
  BIIB-12-921 VL-CDR2
AASSLQS

SEQ ID NO: 1760 - protein, 7 aa, Artificial sequence
  BIIB-12-922 VL-CDR2
LGSNRAS

SEQ ID NO: 1761 - protein, 7 aa, Artificial sequence
  BIIB-12-923 VL-CDR2
KASSLES

SEQ ID NO: 1762 - protein, 7 aa, Artificial sequence
  BIIB-12-924 VL-CDR2
AASSLQS

SEQ ID NO: 1763 - protein, 7 aa, Artificial sequence
  BIIB-12-926 VL-CDR2
GASTRAT

SEQ ID NO: 1764 - protein, 7 aa, Artificial sequence
  BIIB-12-927 VL-CDR2
GASTRAT

SEQ ID NO: 1765 - protein, 7 aa, Artificial sequence
  BIIB-12-928 VL-CDR2
GASSRAT

SEQ ID NO: 1766 - protein, 7 aa, Artificial sequence
  BIIB-12-929 VL-CDR2
WASTRES

SEQ ID NO: 1767 - protein, 7 aa, Artificial sequence
  BIIB-12-930 VL-CDR2
WASTRES

SEQ ID NO: 1768 - protein, 7 aa, Artificial sequence
  BIIB-12-931 VL-CDR2
GASTRAT

SEQ ID NO: 1769 - protein, 7 aa, Artificial sequence
  BIIB-12-932 VL-CDR2
AASSLQS

SEQ ID NO: 1770 - protein, 7 aa, Artificial sequence
  BIIB-12-933 VL-CDR2
GASSRAT

SEQ ID NO: 1771 - protein, 7 aa, Artificial sequence
  BIIB-12-934 VL-CDR2
GASTRAT

SEQ ID NO: 1772 - protein, 7 aa, Artificial sequence
  BIIB-12-935 VL-CDR2
GASSRAT

SEQ ID NO: 1773 - protein, 7 aa, Artificial sequence
  BIIB-12-936 VL-CDR2
GASTRAT

SEQ ID NO: 1774 - protein, 7 aa, Artificial sequence
  BIIB-12-937 VL-CDR2
LGSNRAS

SEQ ID NO: 1775 - protein, 7 aa, Artificial sequence
  BIIB-12-1288 VL-CDR2
WASTRES

SEQ ID NO: 1776 - protein, 7 aa, Artificial sequence
  BIIB-12-1289 VL-CDR2
WASTRES

SEQ ID NO: 1777 - protein, 7 aa, Artificial sequence
  BIIB-12-1290 VL-CDR2
AASSLQS

SEQ ID NO: 1778 - protein, 7 aa, Artificial sequence
  BIIB-12-1291 VL-CDR2
DASNRAT

SEQ ID NO: 1779 - protein, 7 aa, Artificial sequence
  BIIB-12-1292 VL-CDR2
DSSNRAT

SEQ ID NO: 1780 - protein, 7 aa, Artificial sequence
  BIIB-12-1293 VL-CDR2
AASSLQS

SEQ ID NO: 1781 - protein, 7 aa, Artificial sequence
  BIIB-12-1294 VL-CDR2
KASSLES

SEQ ID NO: 1782 - protein, 7 aa, Artificial sequence
  BIIB-12-1295 VL-CDR2
AASNLQS

SEQ ID NO: 1783 - protein, 7 aa, Artificial sequence
  BIIB-12-1296 VL-CDR2
GASSRAT

SEQ ID NO: 1784 - protein, 7 aa, Artificial sequence
  BIIB-12-1297 VL-CDR2
DASNRAT

SEQ ID NO: 1785 - protein, 7 aa, Artificial sequence
  BIIB-12-1298 VL-CDR2
AASSLQS

SEQ ID NO: 1786 - protein, 7 aa, Artificial sequence
  BIIB-12-1299 VL-CDR2
GASTRAT

SEQ ID NO: 1787 - protein, 7 aa, Artificial sequence
  BIIB-12-1300 VL-CDR2
AASSLQS

SEQ ID NO: 1788 - protein, 7 aa, Artificial sequence
  BIIB-12-1301 VL-CDR2
DASKRAT

SEQ ID NO: 1789 - protein, 7 aa, Artificial sequence
  BIIB-12-1302 VL-CDR2
GASTRAT

SEQ ID NO: 1790 - protein, 7 aa, Artificial sequence
  BIIB-12-1303 VL-CDR2
AASSLQS

SEQ ID NO: 1791 - protein, 7 aa, Artificial sequence
  BIIB-12-1304 VL-CDR2
GASTRAT

SEQ ID NO: 1792 - protein, 7 aa, Artificial sequence
  BIIB-12-1305 VL-CDR2
DASNRAT

SEQ ID NO: 1793 - protein, 7 aa, Artificial sequence
  BIIB-12-1306 VL-CDR2
WASTRES

SEQ ID NO: 1794 - protein, 7 aa, Artificial sequence
  BIIB-12-1307 VL-CDR2
AASSLQS

SEQ ID NO: 1795 - protein, 7 aa, Artificial sequence
  BIIB-12-1308 VL-CDR2
GASSRAT

SEQ ID NO: 1796 - protein, 7 aa, Artificial sequence
  BIIB-12-1309 VL-CDR2
AASSLQS

SEQ ID NO: 1797 - protein, 7 aa, Artificial sequence
  BIIB-12-1310 VL-CDR2
DASNRAT

SEQ ID NO: 1798 - protein, 7 aa, Artificial sequence
  BIIB-12-1311 VL-CDR2
DASNRAT

SEQ ID NO: 1799 - protein, 7 aa, Artificial sequence
  BIIB-12-1312 VL-CDR2
AASSLQS

SEQ ID NO: 1800 - protein, 7 aa, Artificial sequence
  BIIB-12-1313 VL-CDR2
GASTRAT

SEQ ID NO: 1801 - protein, 7 aa, Artificial sequence
  BIIB-12-1314 VL-CDR2
AASSLQS

SEQ ID NO: 1802 - protein, 7 aa, Artificial sequence
  BIIB-12-1315 VL-CDR2
GASTRAT

SEQ ID NO: 1803 - protein, 7 aa, Artificial sequence
  BIIB-12-1316 VL-CDR2
AASSLQS

SEQ ID NO: 1804 - protein, 7 aa, Artificial sequence
  BIIB-12-1317 VL-CDR2
AASSLQS

SEQ ID NO: 1805 - protein, 7 aa, Artificial sequence
  BIIB-12-1318 VL-CDR2
DASNRAT

SEQ ID NO: 1806 - protein, 7 aa, Artificial sequence
  BIIB-12-1319 VL-CDR2
GASTRAT

SEQ ID NO: 1807 - protein, 7 aa, Artificial sequence
  BIIB-12-1322 VL-CDR2
WASTRES

SEQ ID NO: 1808 - protein, 7 aa, Artificial sequence
  BIIB-12-1323 VL-CDR2
AASSLQS

SEQ ID NO: 1809 - protein, 7 aa, Artificial sequence
  BIIB-12-1324 VL-CDR2
DSSNRAT

SEQ ID NO: 1810 - protein, 7 aa, Artificial sequence
  BIIB-12-1325 VL-CDR2
KASSLES

SEQ ID NO: 1811 - protein, 7 aa, Artificial sequence
  BIIB-12-1326 VL-CDR2
GASSRAT

SEQ ID NO: 1812 - protein, 7 aa, Artificial sequence
  BIIB-12-1327 VL-CDR2
GASTRAT

SEQ ID NO: 1813 - protein, 7 aa, Artificial sequence
  BIIB-12-1328 VL-CDR2
GASTRAT

SEQ ID NO: 1814 - protein, 7 aa, Artificial sequence
  BIIB-12-1329 VL-CDR2
SASTRAT

SEQ ID NO: 1815 - protein, 7 aa, Artificial sequence
  BIIB-12-1330 VL-CDR2
AASSLQS

SEQ ID NO: 1816 - protein, 7 aa, Artificial sequence
  BIIB-12-1331 VL-CDR2
DASNRAT

SEQ ID NO: 1817 - protein, 7 aa, Artificial sequence
  BIIB-12-1332 VL-CDR2
AASSLQS

SEQ ID NO: 1818 - protein, 7 aa, Artificial sequence
  BIIB-12-1333 VL-CDR2
GASTRAT

SEQ ID NO: 1819 - protein, 7 aa, Artificial sequence
  BIIB-12-1334 VL-CDR2
LASNRAS

SEQ ID NO: 1820 - protein, 9 aa, Artificial sequence
  BIIB-12-891 VL-CDR3
QQYFNPPFT

SEQ ID NO: 1821 - protein, 9 aa, Artificial sequence
  BIIB-12-892 VL-CDR3
QQRLNLPLT

SEQ ID NO: 1822 - protein, 9 aa, Artificial sequence
  BIIB-12-893 VL-CDR3
QQAAAFPFT

SEQ ID NO: 1823 - protein, 9 aa, Artificial sequence
  BIIB-12-895 VL-CDR3
QQASSFPFT

SEQ ID NO: 1824 - protein, 9 aa, Artificial sequence
  BIIB-12-896 VL-CDR3
QQANSFPFT

SEQ ID NO: 1825 - protein, 9 aa, Artificial sequence
  BIIB-12-897 VL-CDR3
QQDGNYPYT

SEQ ID NO: 1826 - protein, 9 aa, Artificial sequence
  BIIB-12-898 VL-CDR3
QQVNRFPFT

SEQ ID NO: 1827 - protein, 9 aa, Artificial sequence
  BIIB-12-899 VL-CDR3
QQSYTLPPT

SEQ ID NO: 1828 - protein, 8 aa, Artificial sequence
  BIIB-12-900 VL-CDR3
QQYRSYPT

SEQ ID NO: 1829 - protein, 9 aa, Artificial sequence
  BIIB-12-901 VL-CDR3
QQSANFPFT

SEQ ID NO: 1830 - protein, 9 aa, Artificial sequence
  BIIB-12-902 VL-CDR3
QQSFSTPFT

SEQ ID NO: 1831 - protein, 9 aa, Artificial sequence
  BIIB-12-903 VL-CDR3
QQRANWPPT

SEQ ID NO: 1832 - protein, 9 aa, Artificial sequence
  BIIB-12-904 VL-CDR3
QQAFNWPPT

SEQ ID NO: 1833 - protein, 9 aa, Artificial sequence
  BIIB-12-905 VL-CDR3
QQYGRFPPT

SEQ ID NO: 1834 - protein, 9 aa, Artificial sequence
  BIIB-12-906 VL-CDR3
QQSSDWPPT

SEQ ID NO: 1835 - protein, 9 aa, Artificial sequence
  BIIB-12-907 VL-CDR3
MQRLGLPPT

SEQ ID NO: 1836 - protein, 9 aa, Artificial sequence
  BIIB-12-908 VL-CDR3
QQGSSLPIT

SEQ ID NO: 1837 - protein, 9 aa, Artificial sequence
  BIIB-12-909 VL-CDR3
QQLSDWPPT

SEQ ID NO: 1838 - protein, 9 aa, Artificial sequence
  BIIB-12-910 VL-CDR3
QQLSHTPFT

SEQ ID NO: 1839 - protein, 9 aa, Artificial sequence
  BIIB-12-911 VL-CDR3
QQRSNFPIT

SEQ ID NO: 1840 - protein, 9 aa, Artificial sequence
  BIIB-12-912 VL-CDR3
QQFHNFPPT

SEQ ID NO: 1841 - protein, 10 aa, Artificial sequence
  BIIB-12-913 VL-CDR3
QQYAPYPPLT

SEQ ID NO: 1842 - protein, 9 aa, Artificial sequence
  BIIB-12-914 VL-CDR3
QQGYNTPLT

SEQ ID NO: 1843 - protein, 9 aa, Artificial sequence
  BIIB-12-915 VL-CDR3
MQARQRPWT

SEQ ID NO: 1844 - protein, 9 aa, Artificial sequence
  BIIB-12-916 VL-CDR3
QQLAITPFT

SEQ ID NO: 1845 - protein, 9 aa, Artificial sequence
  BIIB-12-917 VL-CDR3
QQLFNHPPT

SEQ ID NO: 1846 - protein, 9 aa, Artificial sequence
  BIIB-12-918 VL-CDR3
QQIFSLPIT

SEQ ID NO: 1847 - protein, 8 aa, Artificial sequence
  BIIB-12-919 VL-CDR3
QQVSSYPT

SEQ ID NO: 1848 - protein, 9 aa, Artificial sequence
  BIIB-12-920 VL-CDR3
QQANAYPPT

SEQ ID NO: 1849 - protein, 9 aa, Artificial sequence
  BIIB-12-921 VL-CDR3
QQGNVFPLT

SEQ ID NO: 1850 - protein, 9 aa, Artificial sequence
  BIIB-12-922 VL-CDR3
MQALQTPIT

SEQ ID NO: 1851 - protein, 9 aa, Artificial sequence
  BIIB-12-923 VL-CDR3
QQFKSLSFT

SEQ ID NO: 1852 - protein, 9 aa, Artificial sequence
  BIIB-12-924 VL-CDR3
QQGNSFPLT

SEQ ID NO: 1853 - protein, 9 aa, Artificial sequence
  BIIB-12-926 VL-CDR3
QQHSFWPPT

SEQ ID NO: 1854 - protein, 9 aa, Artificial sequence
  BIIB-12-927 VL-CDR3
QQFNLWPFT

SEQ ID NO: 1855 - protein, 9 aa, Artificial sequence
  BIIB-12-928 VL-CDR3
QQYVRFPLT

SEQ ID NO: 1856 - protein, 9 aa, Artificial sequence
  BIIB-12-929 VL-CDR3
QQYFSLPFT

SEQ ID NO: 1857 - protein, 9 aa, Artificial sequence
  BIIB-12-930 VL-CDR3
QQYFLSPFT

SEQ ID NO: 1858 - protein, 9 aa, Artificial sequence
  BIIB-12-931 VL-CDR3
QQAAYWPWT

SEQ ID NO: 1859 - protein, 8 aa, Artificial sequence
  BIIB-12-932 VL-CDR3
QQSHSAPT

SEQ ID NO: 1860 - protein, 9 aa, Artificial sequence
  BIIB-12-933 VL-CDR3
QQYSRSPIT

SEQ ID NO: 1861 - protein, 9 aa, Artificial sequence
  BIIB-12-934 VL-CDR3
QQFNDHPIT

SEQ ID NO: 1862 - protein, 9 aa, Artificial sequence
  BIIB-12-935 VL-CDR3
QQYSSSPIT

SEQ ID NO: 1863 - protein, 9 aa, Artificial sequence
  BIIB-12-936 VL-CDR3
QQSHNLPPT

SEQ ID NO: 1864 - protein, 9 aa, Artificial sequence
  BIIB-12-937 VL-CDR3
MQERQTPLT

SEQ ID NO: 1865 - protein, 9 aa, Artificial sequence
  BIIB-12-1288 VL-CDR3
QQSFNTPFT

SEQ ID NO: 1866 - protein, 9 aa, Artificial sequence
  BIIB-12-1289 VL-CDR3
QQYYASPFT

SEQ ID NO: 1867 - protein, 9 aa, Artificial sequence
  BIIB-12-1290 VL-CDR3
QQGFSFPFT

SEQ ID NO: 1868 - protein, 9 aa, Artificial sequence
  BIIB-12-1291 VL-CDR3
QQRLNLPLT

SEQ ID NO: 1869 - protein, 9 aa, Artificial sequence
  BIIB-12-1292 VL-CDR3
QQRLNFPFT

SEQ ID NO: 1870 - protein, 9 aa, Artificial sequence
  BIIB-12-1293 VL-CDR3
QQANIFPFT

SEQ ID NO: 1871 - protein, 9 aa, Artificial sequence
  BIIB-12-1294 VL-CDR3
QQVNTFPFT

SEQ ID NO: 1872 - protein, 9 aa, Artificial sequence
  BIIB-12-1295 VL-CDR3
QQAISLPIT

SEQ ID NO: 1873 - protein, 9 aa, Artificial sequence
  BIIB-12-1296 VL-CDR3
QQYADSPLT

SEQ ID NO: 1874 - protein, 9 aa, Artificial sequence
  BIIB-12-1297 VL-CDR3
QQGNNWPPT

SEQ ID NO: 1875 - protein, 9 aa, Artificial sequence
  BIIB-12-1298 VL-CDR3
QQTNSLPIT

SEQ ID NO: 1876 - protein, 9 aa, Artificial sequence
  BIIB-12-1299 VL-CDR3
QQLNNFPIT

SEQ ID NO: 1877 - protein, 9 aa, Artificial sequence
  BIIB-12-1300 VL-CDR3
QQASSFPPT

SEQ ID NO: 1878 - protein, 9 aa, Artificial sequence
  BIIB-12-1301 VL-CDR3
QQSSSWPPT

SEQ ID NO: 1879 - protein, 9 aa, Artificial sequence
  BIIB-12-1302 VL-CDR3
QQVNNLPLT

SEQ ID NO: 1880 - protein, 9 aa, Artificial sequence
  BIIB-12-1303 VL-CDR3
QQAYSLPIT

SEQ ID NO: 1881 - protein, 9 aa, Artificial sequence
  BIIB-12-1304 VL-CDR3
QQANVLPLT

SEQ ID NO: 1882 - protein, 9 aa, Artificial sequence
  BIIB-12-1305 VL-CDR3
QQSANWPPT

SEQ ID NO: 1883 - protein, 9 aa, Artificial sequence
  BIIB-12-1306 VL-CDR3
QQSVNTPLT

SEQ ID NO: 1884 - protein, 9 aa, Artificial sequence
  BIIB-12-1307 VL-CDR3
QQTYSTPLT

SEQ ID NO: 1885 - protein, 9 aa, Artificial sequence
  BIIB-12-1308 VL-CDR3
QQAGSFPPT

SEQ ID NO: 1886 - protein, 9 aa, Artificial sequence
  BIIB-12-1309 VL-CDR3
QQANSLPIT

SEQ ID NO: 1887 - protein, 9 aa, Artificial sequence
  BIIB-12-1310 VL-CDR3
EQASNWPPT

SEQ ID NO: 1888 - protein, 9 aa, Artificial sequence
  BIIB-12-1311 VL-CDR3
QQASNLPPT

SEQ ID NO: 1889 - protein, 9 aa, Artificial sequence
  BIIB-12-1312 VL-CDR3
QQASSFPPT

SEQ ID NO: 1890 - protein, 9 aa, Artificial sequence
  BIIB-12-1313 VL-CDR3
QQHNHLPIT

SEQ ID NO: 1891 - protein, 9 aa, Artificial sequence
  BIIB-12-1314 VL-CDR3
QQANFFPIT

SEQ ID NO: 1892 - protein, 10 aa, Artificial sequence
  BIIB-12-1315 VL-CDR3
QQVFNWPPWT

SEQ ID NO: 1893 - protein, 9 aa, Artificial sequence
  BIIB-12-1316 VL-CDR3
QQINNFPPT

SEQ ID NO: 1894 - protein, 9 aa, Artificial sequence
  BIIB-12-1317 VL-CDR3
QQRHSLPPT

SEQ ID NO: 1895 - protein, 9 aa, Artificial sequence
  BIIB-12-1318 VL-CDR3
QQLNNWPPT

SEQ ID NO: 1896 - protein, 9 aa, Artificial sequence
  BIIB-12-1319 VL-CDR3
QQASNFPPT

SEQ ID NO: 1897 - protein, 9 aa, Artificial sequence
  BIIB-12-1322 VL-CDR3
QQSYFTPFT

SEQ ID NO: 1898 - protein, 9 aa, Artificial sequence
  BIIB-12-1323 VL-CDR3
QQANIFPFT

SEQ ID NO: 1899 - protein, 8 aa, Artificial sequence
  BIIB-12-1324 VL-CDR3
QQLVSWPT

SEQ ID NO: 1900 - protein, 9 aa, Artificial sequence
  BIIB-12-1325 VL-CDR3
QQSNRYPRT

SEQ ID NO: 1901 - protein, 9 aa, Artificial sequence
  BIIB-12-1326 VL-CDR3
QQAYSSPLT

SEQ ID NO: 1902 - protein, 9 aa, Artificial sequence
  BIIB-12-1327 VL-CDR3
QQYHNFPPT

SEQ ID NO: 1903 - protein, 9 aa, Artificial sequence
  BIIB-12-1328 VL-CDR3
QQPNSYPLT

SEQ ID NO: 1904 - protein, 9 aa, Artificial sequence
  BIIB-12-1329 VL-CDR3
QQVFNWPPT

SEQ ID NO: 1905 - protein, 9 aa, Artificial sequence
  BIIB-12-1330 VL-CDR3
QQAYSVPIT

SEQ ID NO: 1906 - protein, 9 aa, Artificial sequence
  BIIB-12-1331 VL-CDR3
QQRVNLPIT

SEQ ID NO: 1907 - protein, 9 aa, Artificial sequence
  BIIB-12-1332 VL-CDR3
QQVNSFPLT

SEQ ID NO: 1908 - protein, 8 aa, Artificial sequence
  BIIB-12-1333 VL-CDR3
QQVNTWPT

SEQ ID NO: 1909 - protein, 9 aa, Artificial sequence
  BIIB-12-1334 VL-CDR3
MQRIGTPWT

SEQ ID NO: 1910 - protein, 11 aa, Artificial sequence
  BIIB-12-894 VH-CDR1
GSISSSSYYWG

SEQ ID NO: 1911 - protein, 9 aa, Artificial sequence
  BIIB-12-925 VH-CDR1
FTFSSYAMS

SEQ ID NO: 1912 - protein, 11 aa, Artificial sequence
  BIIB-12-1320 VH-CDR1
GSISSSSYYWG

SEQ ID NO: 1913 - protein, 9 aa, Artificial sequence
  BIIB-12-1321 VH-CDR1
GTFSSYAIS

SEQ ID NO: 1914 - protein, 16 aa, Artificial sequence
  BIIB-12-894 VH-CDR2
SIYYSGSTYYNPSLKS

SEQ ID NO: 1915 - protein, 17 aa, Artificial sequence
  BIIB-12-925 VH-CDR2
AISGSGGSTYYADSVKG

SEQ ID NO: 1916 - protein, 16 aa, Artificial sequence
  BIIB-12-1320 VH-CDR2
SIYYSGSTYYNPSLKS

SEQ ID NO: 1917 - protein, 17 aa, Artificial sequence
  BIIB-12-1321 VH-CDR2
GIIPIFGTANYAQKFQG

SEQ ID NO: 1918 - protein, 14 aa, Artificial sequence
  BIIB-12-894 VH-CDR3
AREGAHSSMAGLDV

SEQ ID NO: 1919 - protein, 15 aa, Artificial sequence
  BIIB-12-925 VH-CDR3
AKGPRYYWYSWYFDL

SEQ ID NO: 1920 - protein, 18 aa, Artificial sequence
  BIIB-12-1320 VH-CDR3
ARGSGLLVREHYYYYMDV

SEQ ID NO: 1921 - protein, 11 aa, Artificial sequence
  BIIB-12-1321 VH-CDR3
ARTPDTSSATD

SEQ ID NO: 1922 - protein, 11 aa, Artificial sequence
  BIIB-12-894 VL-CDR1
QASQDISNYLN

SEQ ID NO: 1923 - protein, 12 aa, Artificial sequence
  BIIB-12-925 VL-CDR1
RASQSVSSSYLA

SEQ ID NO: 1924 - protein, 11 aa, Artificial sequence
  BIIB-12-1320 VL-CDR1
RASQSISSYLN

SEQ ID NO: 1925 - protein, 11 aa, Artificial sequence
  BIIB-12-1321 VL-CDR1
RASQSVSSYLA

SEQ ID NO: 1926 - protein, 7 aa, Artificial sequence
  BIIB-12-894 VL-CDR2
DASNLET

SEQ ID NO: 1927 - protein, 7 aa, Artificial sequence
  BIIB-12-925 VL-CDR2
GASSRAT

SEQ ID NO: 1928 - protein, 7 aa, Artificial sequence
  BIIB-12-1320 VL-CDR2
AASSLQS

SEQ ID NO: 1929 - protein, 7 aa, Artificial sequence
  BIIB-12-1321 VL-CDR2
DSSNRAT

SEQ ID NO: 1930 - protein, 9 aa, Artificial sequence
  BIIB-12-894 VL-CDR3
QQDDALPFT

SEQ ID NO: 1931 - protein, 9 aa, Artificial sequence
  BIIB-12-925 VL-CDR3
QQSGGSPLT

SEQ ID NO: 1932 - protein, 9 aa, Artificial sequence
  BIIB-12-1320 VL-CDR3
QQADDTPWT

SEQ ID NO: 1933 - protein, 9 aa, Artificial sequence
  BIIB-12-1321 VL-CDR3
QQFTNLPYT

SEQ ID NO: 1934 - DNA, 366 bp, Artificial sequence
  BIIB-9-3595 VH DNA
gaggtgcagctggtggagtctgggggaggcctggtcaagcctggggggtccctgagactctcctgtgcagcctctggattcaccttcagtagctatagcatgaactgggtccgccaggctccagggaaggggctggagtgggtctcatccattagtagtagtagtagttacatatactacgcagactcagtgaaaggccgattcaccatctccagagacaacgccaagaactcactgtatctgcaaatgaacagcctgagagccgaggacacggcggtgtactactgcgccagagatttgggtggatacgcagggtactacggcatggatgtatgggggcaagggaccacggtcaccgtctcctca

SEQ ID NO: 1935 - protein, 122 aa, Artificial sequence
  BIIB-9-3595 VH protein
EVQLVESGGGLVKPGGSLRLSCAASGFTFSSYSMNWVRQAPGKGLEWVSSISSSSSYIYYADSVKGRFTISRDNAKNSLYLQMNSLRAEDTAVYYCARDLGGYAGYYGMDVWGQGTTVTVSS

SEQ ID NO: 1936 - DNA, 321 bp, Artificial sequence; identical to SEQ ID NO: 222
  BIIB-9-3595 VL DNA

SEQ ID NO: 1937 - protein, 107 aa, Artificial sequence; identical to SEQ ID NO: 221
  BIIB-9-3595 VL protein

SEQ ID NO: 1938 - DNA, 366 bp, Artificial sequence
  BIIB-9-3601 VH DNA
gaggtgcagctggtggagtctgggggaggcctggtcaagcctggggggtccctgagactctcctgtgcagcctctggattcaccttcagtagcttcagcatgaactgggtccgccaggctccagggaaggggctggagtgggtctcatccattagtagtgctgggagttacatatactacgcagactcagtgaagggccgattcaccatctccagagacaacgccaagaactcactgtatctgcaaatgaacagcctgagagccgaggacacggcggtgtactactgcgccagagatgtaggaggatacgcagggtactacggcatggatgtatggggccagggaacaactgtcaccgtctcctca

SEQ ID NO: 1939 - protein, 122 aa, Artificial sequence
  BIIB-9-3601 VH protein
EVQLVESGGGLVKPGGSLRLSCAASGFTFSSFSMNWVRQAPGKGLEWVSSISSAGSYIYYADSVKGRFTISRDNAKNSLYLQMNSLRAEDTAVYYCARDVGGYAGYYGMDVWGQGTTVTVSS

SEQ ID NO: 1940 - DNA, 321 bp, Artificial sequence; identical to SEQ ID NO: 222
  BIIB-9-3601 VL DNA

SEQ ID NO: 1941 - protein, 107 aa, Artificial sequence; identical to SEQ ID NO: 221
  BIIB-9-3601 VL protein

SEQ ID NO: 1942 - DNA, 366 bp, Artificial sequence
  BIIB-9-3604 VH DNA
gaggtgcagctggtggagtctgggggaggcctggtcaagcctggggggtccctgagactctcctgtgcagcctctggattcaccttcagtagctatgatatggtgtgggtccgccaggctccagggaaggggctggagtgggtctcatccattagtagtggggatagttacatatactacgcagactcagtgaagggccgattcaccatctccagagacaacgccaagaactcactgtatctgcaaatgaacagcctgagagccgaggacacggcggtgtactactgcgccagagatgtaggaggatacgcagggtactacggcatggatgtatggggccagggaacaactgtcaccgtctcctca

SEQ ID NO: 1943 - protein, 122 aa, Artificial sequence
  BIIB-9-3604 VH protein
EVQLVESGGGLVKPGGSLRLSCAASGFTFSSYDMVWVRQAPGKGLEWVSSISSGDSYIYYADSVKGRFTISRDNAKNSLYLQMNSLRAEDTAVYYCARDVGGYAGYYGMDVWGQGTTVTVSS

SEQ ID NO: 1944 - DNA, 321 bp, Artificial sequence; identical to SEQ ID NO: 222
  BIIB-9-3604 VL DNA

SEQ ID NO: 1945 - protein, 107 aa, Artificial sequence; identical to SEQ ID NO: 221
  BIIB-9-3604 VL protein

SEQ ID NO: 1946 - DNA, 366 bp, Artificial sequence
  BIIB-9-3617 VH DNA
gaggtgcagctggtggagtctgggggaggcctggtcaagcctggggggtccctgagactctcctgtgcagcctctggattcaccttcagtagctattctatgacttgggtccgccaggctccagggaaggggctggagtgggtctcatccattagtagtagtggtacgtacatatactacgcagactcagtgaagggccgattcaccatctccagagacaacgccaagaactcactgtatctgcaaatgaacagcctgagagccgaggacacggcggtgtactactgcgccagagatgtaggaggatacgcagggtactacggcatggatgtatggggccagggaacaactgtcaccgtctcctca

SEQ ID NO: 1947 - protein, 122 aa, Artificial sequence
  BIIB-9-3617 VH protein
EVQLVESGGGLVKPGGSLRLSCAASGFTFSSYSMTWVRQAPGKGLEWVSSISSSGTYIYYADSVKGRFTISRDNAKNSLYLQMNSLRAEDTAVYYCARDVGGYAGYYGMDVWGQGTTVTVSS

SEQ ID NO: 1948 - DNA, 321 bp, Artificial sequence; identical to SEQ ID NO: 222
  BIIB-9-3617 VL DNA

SEQ ID NO: 1949 - protein, 107 aa, Artificial sequence; identical to SEQ ID NO: 221
  BIIB-9-3617 VL protein

SEQ ID NO: 1950 - DNA, 366 bp, Artificial sequence
  BIIB-9-3618 VH DNA
gaggtgcagctggtggagtctgggggaggcctggtcaagcctggggggtccatgagactctcctgtgcagcctctggattcaccttcagtagctatgagatggtttgggtccgccaggctccagggaaggggctggagtgggtctcatatattagtagtggtagtagttacatatactacgcagactcagtgaagggccgattcaccatctccagagacaacgccaagaactcactgtatctgcaaatgaacagcctgagagccgaggacacggcggtgtactactgcgccagagatgtaggaggatacgcagggtactacggcatggatgtatggggccagggaacaactgtcaccgtctcctca

SEQ ID NO: 1951 - protein, 122 aa, Artificial sequence
  BIIB-9-3618 VH protein
EVQLVESGGGLVKPGGSMRLSCAASGFTFSSYEMVWVRQAPGKGLEWVSYISSGSSYIYYADSVKGRFTISRDNAKNSLYLQMNSLRAEDTAVYYCARDVGGYAGYYGMDVWGQGTTVTVSS

SEQ ID NO: 1952 - DNA, 321 bp, Artificial sequence; identical to SEQ ID NO: 222
  BIIB-9-3618 VL DNA

SEQ ID NO: 1953 - protein, 107 aa, Artificial sequence; identical to SEQ ID NO: 221
  BIIB-9-3618 VL protein

SEQ ID NO: 1954 - DNA, 366 bp, Artificial sequence
  BIIB-9-3621 VH DNA
gaggtgcagctggtggagtctgggggaggcctggtcaagcctggggggtccctgagactctcctgtgcagcctctggattcaccttcgggagctatagcatggcttgggtccgccaggctccagggaaggggctggagtgggtctcaggtattagtagtagtagtggttacatatactacgcagactcagtgaagggccgattcaccatctccagagacaacgccaagaactcactgtatctgcaaatgaacagcctgagagccgaggacacggcggtgtactactgcgccagagatgtaggaggatacgcagggtactacggcatggatgtatggggccagggaacaactgtcaccgtctcctca

SEQ ID NO: 1955 - protein, 122 aa, Artificial sequence
  BIIB-9-3621 VH protein
EVQLVESGGGLVKPGGSLRLSCAASGFTFGSYSMAWVRQAPGKGLEWVSGISSSSGYIYYADSVKGRFTISRDNAKNSLYLQMNSLRAEDTAVYYCARDVGGYAGYYGMDVWGQGTTVTVSS

SEQ ID NO: 1956 - DNA, 321 bp, Artificial sequence; identical to SEQ ID NO: 222
  BIIB-9-3621 VL DNA

SEQ ID NO: 1957 - protein, 107 aa, Artificial sequence; identical to SEQ ID NO: 221
  BIIB-9-3621 VL protein

SEQ ID NO: 1958 - DNA, 366 bp, Artificial sequence
  BIIB-9-3647 VH DNA
gaggtgcagctggtggagtctgggggaggcctggtcaagcctggggggtccctgagactctcctgtgcagcctctggattcaccttcagtagctatggtatggtgtgggtccgccaggctccagggaaggggctggagtgggtctcatccattagtagtgcgagtagttacatatactacgcagactcagtgaagggccgattcaccatctccagagacaacgccaagaactcactgtatctgcaaatgaacagcctgagagccgaggacacggcggtgtactactgcgccagagatgtaggaggatacgcagggtactacggcatggatgtatggggccagggaacaactgtcaccgtctcctca

SEQ ID NO: 1959 - protein, 122 aa, Artificial sequence
  BIIB-9-3647 VH protein
EVQLVESGGGLVKPGGSLRLSCAASGFTFSSYGMVWVRQAPGKGLEWVSSISSASSYIYYADSVKGRFTISRDNAKNSLYLQMNSLRAEDTAVYYCARDVGGYAGYYGMDVWGQGTTVTVSS

SEQ ID NO: 1960 - DNA, 321 bp, Artificial sequence; identical to SEQ ID NO: 222
  BIIB-9-3647 VL DNA

SEQ ID NO: 1961 - protein, 107 aa, Artificial sequence; identical to SEQ ID NO: 221
  BIIB-9-3647 VL protein

SEQ ID NO: 1962 - DNA, 366 bp, Artificial sequence
  BIIB-9-3649 VH DNA
gaggtgcagctggtggagtctgggggaggcctggtcaagcctggggggtccctgagactctcctgtgcagcctctggattcaccttcagtagctatggtatggcttgggtccgccaggctccagggaaggggctggagtgggtctcaggtattagtagtagttcgagttacatatactacgcagactcagtgaagggccgattcaccatctccagagacaacgccaagaactcactgtatctgcaaatgaacagcctgagagccgaggacacggcggtgtactactgcgccagagatgtaggaggatacgcagggtactacggcatggatgtatggggccagggaacaactgtcaccgtctcctca

SEQ ID NO: 1963 - protein, 122 aa, Artificial sequence
  BIIB-9-3649 VH protein
EVQLVESGGGLVKPGGSLRLSCAASGFTFSSYGMAWVRQAPGKGLEWVSGISSSSSYIYYADSVKGRFTISRDNAKNSLYLQMNSLRAEDTAVYYCARDVGGYAGYYGMDVWGQGTTVTVSS

SEQ ID NO: 1964 - DNA, 321 bp, Artificial sequence; identical to SEQ ID NO: 222
  BIIB-9-3649 VL DNA

SEQ ID NO: 1965 - protein, 107 aa, Artificial sequence; identical to SEQ ID NO: 221
  BIIB-9-3649 VL protein

SEQ ID NO: 1966 - DNA, 366 bp, Artificial sequence
  BIIB-9-3650 VH DNA
gaggtgcagctggtggagtctgggggaggcttggtacagcctggggggtccctgagactctcctgtgcagcctctggattcaccttcgggagctatgagatgaactgggtccgccaggctccagggaaggggctggagtgggtttcagcgattagtgctagtagtagtaccatatactacgcagactctgtgaagggccgattcaccatctccagagacaatgccaagaactcactgtatctgcaaatgaacagcctgagagctgaggacacggcggtgtactactgcgccagagatgtaggaggatacgcagggtactacggcatggatgtatggggccagggaacaactgtcaccgtctcctca

SEQ ID NO: 1967 - protein, 122 aa, Artificial sequence
  BIIB-9-3650 VH protein
EVQLVESGGGLVQPGGSLRLSCAASGFTFGSYEMNWVRQAPGKGLEWVSAISASSSTIYYADSVKGRFTISRDNAKNSLYLQMNSLRAEDTAVYYCARDVGGYAGYYGMDVWGQGTTVTVSS

SEQ ID NO: 1968 - DNA, 321 bp, Artificial sequence; identical to SEQ ID NO: 222
  BIIB-9-3650 VL DNA

SEQ ID NO: 1969 - protein, 107 aa, Artificial sequence; identical to SEQ ID NO: 221
  BIIB-9-3650 VL protein

SEQ ID NO: 1970 - DNA, 366 bp, Artificial sequence
  BIIB-9-3654 VH DNA
gaggtgcagctggtggagtctgggggaggcctggtcaagcctggggggtccctgagactctcctgtgcagcctctggattcaccttcgagagctatagcatgaactgggtccgccaggctccagggaaggggctggagtgggtctcagggattagtagtgctagtagttacatatactacgcagactcagtgaagggccgattcaccatctccagagacaacgccaagaactcactgtatctgcaaatgaacagcctgagagccgaggacacggcggtgtactactgcgccagagatgtaggaggatacgcagggtactacggcatggatgtatggggccagggaacaactgtcaccgtctcctca

SEQ ID NO: 1971 - protein, 122 aa, Artificial sequence
  BIIB-9-3654 VH protein
EVQLVESGGGLVKPGGSLRLSCAASGFTFESYSMNWVRQAPGKGLEWVSGISSASSYIYYADSVKGRFTISRDNAKNSLYLQMNSLRAEDTAVYYCARDVGGYAGYYGMDVWGQGTTVTVSS

SEQ ID NO: 1972 - DNA, 321 bp, Artificial sequence; identical to SEQ ID NO: 222
  BIIB-9-3654 VL DNA

SEQ ID NO: 1973 - protein, 107 aa, Artificial sequence; identical to SEQ ID NO: 221
  BIIB-9-3654 VL protein

SEQ ID NO: 1974 - DNA, 366 bp, Artificial sequence
  BIIB-9-3753 VH DNA
gaggtgcagctggtggagtctgggggaggcctggtcaagcctggggggtccctgagactctcctgtgcagcctctggattcaccttcgggagctatgatatgaactgggtccgccaggctccagggaaggggctggagtgggtctcatccattagtgacagtgcaagttacatagcctacgcagactcagtgaagggccgattcaccatctccagagacaacgccaagaactcactgtatctgcaaatgaacagcctgagagccgaggacacggcggtgtactactgcgccagagatgtttcgggatacgcagggtactacggcatggatgtatgggggcaagggaccacggtcaccgtctcctca

SEQ ID NO: 1975 - protein, 122 aa, Artificial sequence
  BIIB-9-3753 VH protein
EVQLVESGGGLVKPGGSLRLSCAASGFTFGSYDMNWVRQAPGKGLEWVSSISDSASYIAYADSVKGRFTISRDNAKNSLYLQMNSLRAEDTAVYYCARDVSGYAGYYGMDVWGQGTTVTVSS

SEQ ID NO: 1976 - DNA, 321 bp, Artificial sequence; identical to SEQ ID NO: 222
  BIIB-9-3753 VL DNA

SEQ ID NO: 1977 - protein, 107 aa, Artificial sequence; identical to SEQ ID NO: 221
  BIIB-9-3753 VL protein

SEQ ID NO: 1978 - DNA, 366 bp, Artificial sequence
  BIIB-9-3754 VH DNA
gaggtgcagctggtggagtctgggggaggcctggtcaagcctggggggtccctgagactctcctgtgcagcctctggattcaccttcgggagctatgatatgaactgggtccgccaggctccagggaaggggctggagtgggtctcatccattagtagtggtgagagttacatatactacgcagagtcagtgaagggccgattcaccatctccagagacaacgccaagaactcactgtatctgcaaatgaacagcctgagagccgaggacacggcggtgtactactgcgccagagatgtaggaggatacgcagggttttatggcatggatgtatgggggcaagggaccacggtcaccgtctcctca

SEQ ID NO: 1979 - protein, 122 aa, Artificial sequence
  BIIB-9-3754 VH protein
EVQLVESGGGLVKPGGSLRLSCAASGFTFGSYDMNWVRQAPGKGLEWVSSISSGESYIYYAESVKGRFTISRDNAKNSLYLQMNSLRAEDTAVYYCARDVGGYAGFYGMDVWGQGTTVTVSS

SEQ ID NO: 1980 - DNA, 321 bp, Artificial sequence; identical to SEQ ID NO: 222
  BIIB-9-3754 VL DNA

SEQ ID NO: 1981 - protein, 107 aa, Artificial sequence; identical to SEQ ID NO: 221
  BIIB-9-3754 VL protein

SEQ ID NO: 1982 - DNA, 366 bp, Artificial sequence
  BIIB-9-3756 VH DNA
gaggtgcagctggtggagtctgggggaggcctggtcaagcctggggggtccctgagactctcctgtgcagcctctggattcaccttcgggagctatgatatgaactgggtccgccaggctccagggaaggggctggagtgggtctcatccattagtagtggtgagagttacatatactacgcagagtcagtgaagggccgattcaccatctccagagacaacgccaagaactcactgtatctgcaaatgaacagcctgagagccgaggacacggcggtgtactactgcgtcagagatgtaggaggatacgcagggtactacggcatggatgtatgggggcaagggaccacggtcaccgtctcctca

SEQ ID NO: 1983 - protein, 122 aa, Artificial sequence
  BIIB-9-3756 VH protein
EVQLVESGGGLVKPGGSLRLSCAASGFTFGSYDMNWVRQAPGKGLEWVSSISSGESYIYYAESVKGRFTISRDNAKNSLYLQMNSLRAEDTAVYYCVRDVGGYAGYYGMDVWGQGTTVTVSS

SEQ ID NO: 1984 - DNA, 321 bp, Artificial sequence; identical to SEQ ID NO: 222
  BIIB-9-3756 VL DNA

SEQ ID NO: 1985 - protein, 107 aa, Artificial sequence; identical to SEQ ID NO: 221
  BIIB-9-3756 VL protein

SEQ ID NO: 1986 - DNA, 366 bp, Artificial sequence; identical to SEQ ID NO: 90
  BIIB-9-3764 VH DNA

SEQ ID NO: 1987 - protein, 122 aa, Artificial sequence; identical to SEQ ID NO: 89
  BIIB-9-3764 VH protein

SEQ ID NO: 1988 - DNA, 321 bp, Artificial sequence
  BIIB-9-3764 VL DNA
gacatccagatgacccagtctccatcctccctgtctgcatctgtaggagacagagtcaccatcacttgcggagcgaatcagtacattagcgactatttaaattggtatcagcagaaaccagggaaagcccctaagctcctgatctacgatgcagccaatttgcacacaggggtcccatcaaggttcagtggaagtggatctgggacagattttactttcaccatcagcagcctgcagcctgaagatattgcaacatattactgtcagcagtacgccaggttcccttacactttcggcggagggaccaaggttgagatcaaa

SEQ ID NO: 1989 - protein, 107 aa, Artificial sequence
  BIIB-9-3764 VL protein
DIQMTQSPSSLSASVGDRVTITCGANQYISDYLNWYQQKPGKAPKLLIYDAANLHTGVPSRFSGSGSGTDFTFTISSLQPEDIATYYCQQYARFPYTFGGGTKVEIK

SEQ ID NO: 1990 - DNA, 366 bp, Artificial sequence; identical to SEQ ID NO: 90
  BIIB-9-3766 VH DNA

SEQ ID NO: 1991 - protein, 122 aa, Artificial sequence; identical to SEQ ID NO: 89
  BIIB-9-3766 VH protein

SEQ ID NO: 1992 - DNA, 321 bp, Artificial sequence
  BIIB-9-3766 VL DNA
gacatccagatgacccagtctccatcctccctgtctgcatctgtaggagacagagtcaccatcacttgcgaagcgagtgaagacattagcaactatttaaattggtatcagcagaaaccagggaaagcccctaagctcctgatctacgatgcatccaatttgcaatacggggtcccatcaaggttcagtggaagtggatctgggacagattttactttcaccatcagcagcctgcagcctgaagatattgcaacatattactgtagtcagtacgccaacttcccttacactttcggcggagggaccaaggttgagatcaaa

SEQ ID NO: 1993 - protein, 107 aa, Artificial sequence
  BIIB-9-3766 VL protein
DIQMTQSPSSLSASVGDRVTITCEASEDISNYLNWYQQKPGKAPKLLIYDASNLQYGVPSRFSGSGSGTDFTFTISSLQPEDIATYYCSQYANFPYTFGGGTKVEIK

SEQ ID NO: 1994 - DNA, 363 bp, Artificial sequence
  BIIB-9-3707 VH DNA
caggtgcagctggtgcagtctggggctgaggtgaggaagcctggggcctcagtgaaggtttcctgcaaggcatctggatacaccttcaccagctactatatgcactgggtgcgacaggcccctggacaagggcttgagtggatgggaataatcaaccctagtggtggtagcacaagctacgcacagaagttccagggcagagtcaccatgaccagggacacgtccacgagcacagtctacatggagctgagcagcctgagatctgaggacacggcggtgtactactgcgccagagacggaccaagagagtcggactactacatggacgtatggggcaaagggaccacggtcaccgtctcctca

SEQ ID NO: 1995 - protein, 121 aa, Artificial sequence
  BIIB-9-3707 VH protein
QVQLVQSGAEVRKPGASVKVSCKASGYTFTSYYMHWVRQAPGQGLEWMGIINPSGGSTSYAQKFQGRVTMTRDTSTSTVYMELSSLRSEDTAVYYCARDGPRESDYYMDVWGKGTTVTVSS

SEQ ID NO: 1996 - DNA, 321 bp, Artificial sequence; identical to SEQ ID NO: 236
  BIIB-9-3707 VL DNA

SEQ ID NO: 1997 - protein, 107 aa, Artificial sequence; identical to SEQ ID NO: 235
  BIIB-9-3707 VL protein

SEQ ID NO: 1998 - DNA, 363 bp, Artificial sequence
  BIIB-9-3709 VH DNA
caggtgcagctggtgcagtctggggctgaggtgaggaagcctggggcctcagtgaaggtttcctgcaaggcatctggatacaccttcaccagctactatatgcactgggtgcgacaggcccctggacaagggcttgagtgggtgggaataatcaaccctagtggtggtagcacaagctacgcacagaagttccagggcagagtcaccatgaccagggacacgtccacgagcacagtctacatggagctgagcagcctgagatctgaggacacggcggtgtactactgcgccagagacggaccaagagatgtggactactacatggacgtatggggcaaagggaccacggtcaccgtctcctca

SEQ ID NO: 1999 - protein, 121 aa, Artificial sequence
  BIIB-9-3709 VH protein
QVQLVQSGAEVRKPGASVKVSCKASGYTFTSYYMHWVRQAPGQGLEWVGIINPSGGSTSYAQKFQGRVTMTRDTSTSTVYMELSSLRSEDTAVYYCARDGPRDVDYYMDVWGKGTTVTVSS

SEQ ID NO: 2000 - DNA, 321 bp, Artificial sequence; identical to SEQ ID NO: 236
  BIIB-9-3709 VL DNA

SEQ ID NO: 2001 - protein, 107 aa, Artificial sequence; identical to SEQ ID NO: 235
  BIIB-9-3709 VL protein

SEQ ID NO: 2002 - DNA, 363 bp, Artificial sequence
  BIIB-9-3720 VH DNA
caggtgcagctggtgcagtctggggctgaggtgaggaagcctggggcctcagtgaaggtttcctgcaaggcatctggatacaccttcaccagctactatatgcactgggtgcgacaggcccctggacaagggcttgagtggatgggaataatcaaccctagtggtggtagcacaagctacgcacagaagttccagggcagagtcaccatgaccagggacacgtccacgagcacagtctacatggagctgagcagcctgagatctgaggacacggcggtgtactactgcgccagagacggaccacagcttagtgactactacatggacgtatggggcaaagggaccacggtcaccgtctcctca

SEQ ID NO: 2003 - protein, 121 aa, Artificial sequence
  BIIB-9-3720 VH protein
QVQLVQSGAEVRKPGASVKVSCKASGYTFTSYYMHWVRQAPGQGLEWMGIINPSGGSTSYAQKFQGRVTMTRDTSTSTVYMELSSLRSEDTAVYYCARDGPQLSDYYMDVWGKGTTVTVSS

SEQ ID NO: 2004 - DNA, 321 bp, Artificial sequence; identical to SEQ ID NO: 236
  BIIB-9-3720 VL DNA

SEQ ID NO: 2005 - protein, 107 aa, Artificial sequence; identical to SEQ ID NO: 235
  BIIB-9-3720 VL protein

SEQ ID NO: 2006 - DNA, 363 bp, Artificial sequence
  BIIB-9-3727 VH DNA
caggtgcagctggtgcagtctggggctgaggtgaagaagcctggggcctcagtgaaggtttcctgcaaggcatctggatacaccttccatcattactatatgcactgggtgcgacaggcccctggacaagggcttgagtggatgggaataatcaaccctagtggtggtcggacagagtacgcacagaagttccagggcagagtcaccatgaccagggacacgtccacgagcacagtctacatggagctgagcagcctgagatctgaggacacggcggtgtactactgcgccagagacggaccaagagtcagtgactactacatggacgtatggggcaagggtacaactgtcaccgtctcctca

SEQ ID NO: 2007 - protein, 121 aa, Artificial Sequence
  BIIB-9-3727 VH protein
QVQLVQSGAEVKKPGASVKVSCKASGYTFHHYYMHWVRQAPGQGLEWMGIINPSGGRTEYAQKFQGRVTMTRDTSTSTVYMELSSLRSEDTAVYYCARDGPRVSDYYMDVWGKGTTVTVSS

SEQ ID NO: 2008 - DNA, 321 bp, Artificial sequence; identical to SEQ ID NO: 236
  BIIB-9-3727 VL DNA

SEQ ID NO: 2009 - protein, 107 aa, Artificial sequence; identical to SEQ ID NO: 235
  BIIB-9-3727 VL protein

SEQ ID NO: 2010 - DNA, 363 bp, Artificial sequence
  BIIB-9-3745 VH DNA
caggtgcagctggtgcagtctggggctgaggtgaagaagcctggggcctcagtgaaggtttcctgcaaggcatctggatacaccttcaccggttaccctatgcactgggtgcgacaggcccctggacaagggcttgagtggatgggatcgatcaaccctagtcgtggtagcacaagctacgcacagaagttccagggcagagtcaccatgaccagggacacgtccacgagcacagtctacatggagctgagcagcctgagatctgaggacacggcggtgtactactgcgccagagacggaccaagagtcagtgactactacatggacgtatggggcaagggtacaactgtcaccgtctcctca

SEQ ID NO: 2011 - protein, 121 aa, Artificial sequence
  BIIB-9-3745 VH protein
QVQLVQSGAEVKKPGASVKVSCKASGYTFTGYPMHWVRQAPGQGLEWMGSINPSRGSTSYAQKFQGRVTMTRDTSTSTVYMELSSLRSEDTAVYYCARDGPRVSDYYMDVWGKGTTVTVSS

SEQ ID NO: 2012 - DNA, 321 bp, Artificial sequence; identical to SEQ ID NO: 236
  BIIB-9-3745 VL DNA

SEQ ID NO: 2013 - protein, 107 aa, Artificial sequence; identical to SEQ ID NO: 235
  BIIB-9-3745 VL protein

SEQ ID NO: 2014 - DNA, 360 bp, Artificial sequence
  BIIB-9-3780 VH DNA
cagctgcagctgcaggagtcgggcccaggactggtgaagccttcggagaccctgtccctcacctgcactgtctctggtggctccatcagcagtagtagttactactggggctggatccgccagcccccagggaaggggctggagtggattgggagtatctcctatagtgggagcacctactacaacccgtccctcaagagtcgagtcaccatatccgtagacacgtccaagaaccagttctccctgaagctgagttctgtgaccgccgcagacacggcggtgtactactgcgctagagataagtaccaagactatagtgttgacatatggggccaagggacaatggtcaccgtctcctca

SEQ ID NO: 2015 - protein, 120 aa, Artificial sequence
  BIIB-9-3780 VH protein
QLQLQESGPGLVKPSETLSLTCTVSGGSISSSSYYWGWIRQPPGKGLEWIGSISYSGSTYYNPSLKSRVTISVDTSKNQFSLKLSSVTAADTAVYYCARDKYQDYSVDIWGQGTMVTVSS

SEQ ID NO: 2016 - DNA, 321 bp, Artificial sequence; identical to SEQ ID NO: 372
  BIIB-9-3780 VL DNA

SEQ ID NO: 2017 - protein, 107 aa, Artificial sequence; identical to SEQ ID NO: 371
  BIIB-9-3780 VL protein

SEQ ID NO: 2018 - DNA, 360 bp, Artificial sequence
  BIIB-9-3675 VH DNA
cagctgcagctgcaggagtcgggcccaggactggtgaagccttcggagaccctgtccctcacctgcactgtctctggtggctccatcagcagtacgagttactactgggtgtggatccgccagcccccagggaaggggctggagtggattgggagtatcactgcgagtgggagcacctactacaacccgtccctcaagagtcgagtcaccatatccgtagacacgtccaagaaccagttctccctgaagctgagttctgtgaccgccgcagacacggcggtgtactactgcgccagagataagtaccaagactattcattcgacatatggggtcagggtacaatggtcaccgtctcctca

SEQ ID NO: 2019 - protein, 120 aa, Artificial sequence
  BIIB-9-3675 VH protein
QLQLQESGPGLVKPSETLSLTCTVSGGSISSTSYYWVWIRQPPGKGLEWIGSITASGSTYYNPSLKSRVTISVDTSKNQFSLKLSSVTAADTAVYYCARDKYQDYSFDIWGQGTMVTVSS

SEQ ID NO: 2020 - DNA, 321 bp, Artificial sequence; identical to SEQ ID NO: 372
  BIIB-9-3675 VL DNA

SEQ ID NO: 2021 - protein, 107 aa, Artificial sequence; identical to SEQ ID NO: 371
  BIIB-9-3675 VL protein

SEQ ID NO: 2022 - DNA, 360 bp, Artificial sequence
  BIIB-9-3681 VH DNA
cagctgcagctgcaggagtcgggcccaggactggtgaagccttcggagaccctgtccctcacctgcactgtctctggtggctccatcagcagtgggagttactactggaattggatccgccagcccccagggaaggggctggagtggattgggagtatccagcctagtgggagcacctactacaacccgtccctcaagagtcgagtcaccatatccgtagacacgtccaagaaccagttctccctgaagctgagttctgtgaccgccgcagacacggcggtgtactactgcgctagagataagtaccaagactattcattcgacatatggggtcagggtacaatggtcaccgtctcctca

SEQ ID NO: 2023 - protein, 120 aa, Artificial sequence
  BIIB-9-3681 VH protein
QLQLQESGPGLVKPSETLSLTCTVSGGSISSGSYYWNWIRQPPGKGLEWIGSIQPSGSTYYNPSLKSRVTISVDTSKNQFSLKLSSVTAADTAVYYCARDKYQDYSFDIWGQGTMVTVSS

SEQ ID NO: 2024 - DNA, 321 bp, Artificial sequence; identical to SEQ ID NO: 372
  BIIB-9-3681 VL DNA

SEQ ID NO: 2025 - protein, 107 aa, Artificial sequence; identical to SEQ ID NO: 371
  BIIB-9-3681 VL protein

SEQ ID NO: 2026 - DNA, 360 bp, Artificial sequence
  BIIB-9-3684 VH DNA
cagctgcagctgcaggagtcgggcccaggactggtgaagccttcggagaccctgtccctcacctgcactgtctctggtggctccatcagcagtgttagttactactggaattggatccgccagcccccagggaaggggctggagtggattgggagtatcacttatagtgggagcacccagtacaacccgtccctcaagagtcgagtcaccatatccgtagacacgtccaagaaccagttctccctgaagctgagttctgtgaccgccgcagacacggcggtgtactactgcgctagagataagtaccaagactattcattcgacatatggggtcagggtacaatggtcaccgtctcctca

SEQ ID NO: 2027 - protein, 120 aa, Artificial sequence
  BIIB-9-3684 VH protein
QLQLQESGPGLVKPSETLSLTCTVSGGSISSVSYYWNWIRQPPGKGLEWIGSITYSGSTQYNPSLKSRVTISVDTSKNQFSLKLSSVTAADTAVYYCARDKYQDYSFDIWGQGTMVTVSS

SEQ ID NO: 2028 - DNA, 321 bp, Artificial sequence; identical to SEQ ID NO: 372
  BIIB-9-3684 VL DNA

SEQ ID NO: 2029 - protein, 107 aa, Artificial sequence; identical to SEQ ID NO: 371
  BIIB-9-3684 VL protein

SEQ ID NO: 2030 - DNA, 360 bp, Artificial sequence
  BIIB-9-3698 VH DNA
cagctgcagctgcaggagtcgggcccaggactggtgaagccttcggagaccctgtccctcacctgcactgtctctggtggctccatcgctagtagtagttactactggtcgtggatccgccagcccccagggaaggggctggagtggattgggagtatccggggtagtgggagcacctactacaacccgtccctcaagagtcgagtcaccatatccgtagacacgtccaagaaccagttctccctgaagctgagttctgtgaccgccgcagacacggcggtgtactactgcgctagagataagtaccaagactattcattcgacatatggggtcagggtacaatggtcaccgtctcctca

SEQ ID NO: 2031 - protein, 120 aa, Artificial sequence
  BIIB-9-3698 VH protein
QLQLQESGPGLVKPSETLSLTCTVSGGSIASSSYYWSWIRQPPGKGLEWIGSIRGSGSTYYNPSLKSRVTISVDTSKNQFSLKLSSVTAADTAVYYCARDKYQDYSFDIWGQGTMVTVSS

SEQ ID NO: 2032 - DNA, 321 bp, Artificial sequence; identical to SEQ ID NO: 372
  BIIB-9-3698 VL DNA

SEQ ID NO: 2033 - protein, 107 aa, Artificial sequence; identical to SEQ ID NO: 371
  BIIB-9-3698 VL protein

SEQ ID NO: 2034 - DNA, 360 bp, Artificial sequence
  BIIB-9-3704 VH DNA
caggtgcagctgcaggagtcgggcccaggactggtgaagccttcacagaccctgtccctcacctgtactgtctctggtggctccatcagcagtggtgcgtacgcgtggagctggatccgccagcacccagggaagggcctggagtggattgggtacatctattaccaggggaagacctactacaacccgtccctcaagagtcgagttaccatatcagtagacacgtctaagaaccagttctccctgaagctgagttctgtgaccgccgcagacacggcggtgtactactgcgctagagataagtaccaagactattcattcgacatatggggtcagggtacaatggtcaccgtctcctca

SEQ ID NO: 2035 - protein, 120 aa, Artificial sequence
  BIIB-9-3704 VH protein
QVQLQESGPGLVKPSQTLSLTCTVSGGSISSGAYAWSWIRQHPGKGLEWIGYIYYQGKTYYNPSLKSRVTISVDTSKNQFSLKLSSVTAADTAVYYCARDKYQDYSFDIWGQGTMVTVSS

SEQ ID NO: 2036 - DNA, 321 bp, Artificial sequence; identical to SEQ ID NO: 372
  BIIB-9-3704 VL DNA

SEQ ID NO: 2037 - protein, 107 aa, Artificial sequence; identical to SEQ ID NO: 371
  BIIB-9-3704 VL protein

SEQ ID NO: 2038 - protein, 9 aa, Artificial sequence
  BIIB-9-3595 VH-CDR1
FTFSSYSMN

SEQ ID NO: 2039 - protein, 9 aa, Artificial sequence
  BIIB-9-3601 VH-CDR1
FTFSSFSMN

SEQ ID NO: 2040 - protein, 9 aa, Artificial sequence
  BIIB-9-3604 VH-CDR1
FTFSSYDMV

SEQ ID NO: 2041 - protein, 9 aa, Artificial sequence
  BIIB-9-3617 VH-CDR1
FTFSSYSMT

SEQ ID NO: 2042 - protein, 9 aa, Artificial sequence
  BIIB-9-3618 VH-CDR1
FTFSSYEMV

SEQ ID NO: 2043 - protein, 9 aa, Artificial Sequence
  BIIB-9-3621 VH-CDR1
FTFGSYSMA

SEQ ID NO: 2044 - protein, 9 aa, Artificial sequence
  BIIB-9-3647 VH-CDR1
FTFSSYGMV

SEQ ID NO: 2045 - protein, 9 aa, Artificial sequence
  BIIB-9-3649 VH-CDR1
FTFSSYGMA

SEQ ID NO: 2046 - protein, 9 aa, Artificial sequence
  BIIB-9-3650 VH-CDR1
FTFGSYEMN

SEQ ID NO: 2047 - protein, 9 aa, Artificial sequence
  BIIB-9-3654 VH-CDR1
FTFESYSMN

SEQ ID NO: 2048 - protein, 9 aa, Artificial sequence
  BIIB-9-3753 VH-CDR1
FTFGSYDMN

SEQ ID NO: 2049 - protein, 9 aa, Artificial sequence
  BIIB-9-3754 VH-CDR1
FTFGSYDMN

SEQ ID NO: 2050 - protein, 9 aa, Artificial sequence
  BIIB-9-3756 VH-CDR1
FTFGSYDMN

SEQ ID NO: 2051 - protein, 9 aa, Artificial sequence
  BIIB-9-3764 VH-CDR1
FTFGSYDMN

SEQ ID NO: 2052 - protein, 9 aa, Artificial sequence
  BIIB-9-3766 VH-CDR1
FTFGSYDMN

SEQ ID NO: 2053 - protein, 9 aa, Artificial sequence
  BIIB-9-3707 VH-CDR1
YTFTSYYMH

SEQ ID NO: 2054 - protein, 9 aa, Artificial sequence
  BIIB-9-3709 VH-CDR1
YTFTSYYMH

SEQ ID NO: 2055 - protein, 9 aa, Artificial sequence
  BIIB-9-3720 VH-CDR1
YTFTSYYMH

SEQ ID NO: 2056 - protein, 9 aa, Artificial sequence
  BIIB-9-3727 VH-CDR1
YTFHHYYMH

SEQ ID NO: 2057 - protein, 9 aa, Artificial sequence
  BIIB-9-3745 VH-CDR1
YTFTGYPMH

SEQ ID NO: 2058 - protein, 11 aa, Artificial sequence
  BIIB-9-3780 VH-CDR1
GSISSSSYYWG

SEQ ID NO: 2059 - protein, 11 aa, Artificial sequence
  BIIB-9-3675 VH-CDR1
GSISSTSYYWV

SEQ ID NO: 2060 - protein, 11 aa, Artificial sequence
  BIIB-9-3681 VH-CDR1
GSISSGSYYWN

SEQ ID NO: 2061 - protein, 11 aa, Artificial sequence
  BIIB-9-3684 VH-CDR1
GSISSVSYYWN

SEQ ID NO: 2062 - protein, 11 aa, Artificial sequence
  BIIB-9-3698 VH-CDR1
GSIASSSYYWS

SEQ ID NO: 2063 - protein, 11 aa, Artificial sequence
  BIIB-9-3704 VH-CDR1
GSISSGAYAWS

SEQ ID NO: 2064 - protein, 17 aa, Artificial sequence
  BIIB-9-3595 VH-CDR2
SISSSSSYIYYADSVKG

SEQ ID NO: 2065 - protein, 17 aa, Artificial sequence
  BIIB-9-3601 VH-CDR2
SISSAGSYIYYADSVKG

SEQ ID NO: 2066 - protein, 17 aa, Artificial sequence
  BIIB-9-3604 VH-CDR2
SISSGDSYIYYADSVKG

SEQ ID NO: 2067 - protein, 17 aa, Artificial sequence
  BIIB-9-3617 VH-CDR2
SISSSGTYIYYADSVKG

SEQ ID NO: 2068 - protein, 17 aa, Artificial sequence
  BIIB-9-3618 VH-CDR2
YISSGSSYIYYADSVKG

SEQ ID NO: 2069 - protein, 17 aa, Artificial sequence
  BIIB-9-3621 VH-CDR2
GISSSSGYIYYADSVKG

SEQ ID NO: 2070 - protein, 17 aa, Artificial sequence
  BIIB-9-3647 VH-CDR2
SISSASSYIYYADSVKG

SEQ ID NO: 2071 - protein, 17 aa, Artificial sequence
  BIIB-9-3649 VH-CDR2
GISSSSSYIYYADSVKG

SEQ ID NO: 2072 - protein, 17 aa, Artificial sequence
  BIIB-9-3650 VH-CDR2
AISASSSTIYYADSVKG

SEQ ID NO: 2073 - protein, 17 aa, Artificial sequence
  BIIB-9-3654 VH-CDR2
GISSASSYIYYADSVKG

SEQ ID NO: 2074 - protein, 17 aa, Artificial sequence
  BIIB-9-3753 VH-CDR2
SISDSASYIAYADSVKG

SEQ ID NO: 2075 - protein, 17 aa, Artificial sequence
  BIIB-9-3754 VH-CDR2
SISSGESYIYYAESVKG

SEQ ID NO: 2076 - protein, 17 aa, Artificial sequence
  BIIB-9-3756 VH-CDR2
SISSGESYIYYAESVKG

SEQ ID NO: 2077 - protein, 17 aa, Artificial sequence
  BIIB-9-3764 VH-CDR2
SISSGESYIYYAESVKG

SEQ ID NO: 2078 - protein, 17 aa, Artificial sequence
  BIIB-9-3766 VH-CDR2
SISSGESYIYYAESVKG

SEQ ID NO: 2079 - protein, 17 aa, Artificial sequence
  BIIB-9-3707 VH-CDR2
IINPSGGSTSYAQKFQG

SEQ ID NO: 2080 - protein, 17 aa, Artificial sequence
  BIIB-9-3709 VH-CDR2
IINPSGGSTSYAQKFQG

SEQ ID NO: 2081 - protein, 17 aa, Artificial sequence
  BIIB-9-3720 VH-CDR2
IINPSGGSTSYAQKFQG

SEQ ID NO: 2082 - protein, 17 aa, Artificial sequence
  BIIB-9-3727 VH-CDR2
IINPSGGRTEYAQKFQG

SEQ ID NO: 2083 - protein, 17 aa, Artificial sequence
  BIIB-9-3745 VH-CDR2
SINPSRGSTSYAQKFQG

SEQ ID NO: 2084 - protein, 16 aa, Artificial sequence
  BIIB-9-3780 VH-CDR2
SISYSGSTYYNPSLKS

SEQ ID NO: 2085 - protein, 16 aa, Artificial sequence
  BIIB-9-3675 VH-CDR2
SITASGSTYYNPSLKS

SEQ ID NO: 2086 - protein, 16 aa, Artificial sequence
  BIIB-9-3681 VH-CDR2
SIQPSGSTYYNPSLKS

SEQ ID NO: 2087 - protein, 16 aa, Artificial sequence
  BIIB-9-3684 VH-CDR2
SITYSGSTQYNPSLKS

SEQ ID NO: 2088 - protein, 16 aa, Artificial sequence
  BIIB-9-3698 VH-CDR2
SIRGSGSTYYNPSLKS

SEQ ID NO: 2089 - protein, 16 aa, Artificial sequence
  BIIB-9-3704 VH-CDR2
YIYYQGKTYYNPSLKS

SEQ ID NO: 2090 - protein, 15 aa, Artificial sequence
  BIIB-9-3595 VH-CDR3
ARDLGGYAGYYGMDV

SEQ ID NO: 2091 - protein, 15 aa, Artificial sequence
  BIIB-9-3601 VH-CDR3
ARDVGGYAGYYGMDV

SEQ ID NO: 2092 - protein, 15 aa, Artificial sequence
  BIIB-9-3604 VH-CDR3
ARDVGGYAGYYGMDV

SEQ ID NO: 2093 - protein, 15 aa, Artificial sequence
  BIIB-9-3617 VH-CDR3
ARDVGGYAGYYGMDV

SEQ ID NO: 2094 - protein, 15 aa, Artificial sequence
  BIIB-9-3618 VH-CDR3
ARDVGGYAGYYGMDV

SEQ ID NO: 2095 - protein, 15 aa, Artificial sequence
  BIIB-9-3621 VH-CDR3
ARDVGGYAGYYGMDV

SEQ ID NO: 2096 - protein, 15 aa, Artificial sequence
  BIIB-9-3647 VH-CDR3
ARDVGGYAGYYGMDV

SEQ ID NO: 2097 - protein, 15 aa, Artificial sequence
  BIIB-9-3649 VH-CDR3
ARDVGGYAGYYGMDV

SEQ ID NO: 2098 - protein, 15 aa, Artificial sequence
  BIIB-9-3650 VH-CDR3
ARDVGGYAGYYGMDV

SEQ ID NO: 2099 - protein, 15 aa, Artificial sequence
  BIIB-9-3654 VH-CDR3
ARDVGGYAGYYGMDV

SEQ ID NO: 2100 - protein, 15 aa, Artificial sequence
  BIIB-9-3753 VH-CDR3
ARDVSGYAGYYGMDV

SEQ ID NO: 2101 - protein, 15 aa, Artificial sequence
  BIIB-9-3754 VH-CDR3
ARDVGGYAGFYGMDV

SEQ ID NO: 2102 - protein, 15 aa, Artificial sequence
  BIIB-9-3756 VH-CDR3
VRDVGGYAGYYGMDV

SEQ ID NO: 2103 - protein, 15 aa, Artificial sequence
  BIIB-9-3764 VH-CDR3
ARDVGGYAGYYGMDV

SEQ ID NO: 2104 - protein, 15 aa, Artificial sequence
  BIIB-9-3766 VH-CDR3
ARDVGGYAGYYGMDV

SEQ ID NO: 2105 - protein, 14 aa, Artificial sequence
  BIIB-9-3707 VH-CDR3
ARDGPRESDYYMDV

SEQ ID NO: 2106 - protein, 14 aa, Artificial sequence
  BIIB-9-3709 VH-CDR3
ARDGPRDVDYYMDV

SEQ ID NO: 2107 - protein, 14 aa, Artificial sequence
  BIIB-9-3720 VH-CDR3
ARDGPQLSDYYMDV

SEQ ID NO: 2108 - protein, 14 aa, Artificial sequence
  BIIB-9-3727 VH-CDR3
ARDGPRVSDYYMDV

SEQ ID NO: 2109 - protein, 14 aa, Artificial sequence
  BIIB-9-3745 VH-CDR3
ARDGPRVSDYYMDV

SEQ ID NO: 2110 - protein, 12 aa, Artificial sequence
  BIIB-9-3780 VH-CDR3
ARDKYQDYSVDI

SEQ ID NO: 2111 - protein, 12 aa, Artificial sequence
  BIIB-9-3675 VH-CDR3
ARDKYQDYSFDI

SEQ ID NO: 2112 - protein, 12 aa, Artificial sequence
  BIIB-9-3681 VH-CDR3
ARDKYQDYSFDI

SEQ ID NO: 2113 - protein, 12 aa, Artificial sequence
  BIIB-9-3684 VH-CDR3
ARDKYQDYSFDI

SEQ ID NO: 2114 - protein, 12 aa, Artificial sequence
  BIIB-9-3698 VH-CDR3
ARDKYQDYSFDI

SEQ ID NO: 2115 - protein, 12 aa, Artificial sequence
  BIIB-9-3704 VH-CDR3
ARDKYQDYSFDI

SEQ ID NO: 2116 - protein, 11 aa, Artificial sequence
  BIIB-9-3595 VL-CDR1
QASQDIANYLN

SEQ ID NO: 2117 - protein, 11 aa, Artificial sequence
  BIIB-9-3601 VL-CDR1
QASQDIANYLN

SEQ ID NO: 2118 - protein, 11 aa, Artificial sequence
  BIIB-9-3604 VL-CDR1
QASQDIANYLN

SEQ ID NO: 2119 - protein, 11 aa, Artificial sequence
  BIIB-9-3617 VL-CDR1
QASQDIANYLN

SEQ ID NO: 2120 - protein, 11 aa, Artificial sequence
  BIIB-9-3618 VL-CDR1
QASQDIANYLN

SEQ ID NO: 2121 - protein, 11 aa, Artificial sequence
  BIIB-9-3621 VL-CDR1
QASQDIANYLN

SEQ ID NO: 2122 - protein, 11 aa, Artificial sequence
  BIIB-9-3647 VL-CDR1
QASQDIANYLN

SEQ ID NO: 2123 - protein, 11 aa, Artificial sequence
  BIIB-9-3649 VL-CDR1
QASQDIANYLN

SEQ ID NO: 2124 - protein, 11 aa, Artificial sequence
  BIIB-9-3650 VL-CDR1
QASQDIANYLN

SEQ ID NO: 2125 - protein, 11 aa, Artificial sequence
  BIIB-9-3654 VL-CDR1
QASQDIANYLN

SEQ ID NO: 2126 - protein, 11 aa, Artificial sequence
  BIIB-9-3753 VL-CDR1
QASQDIANYLN

SEQ ID NO: 2127 - protein, 11 aa, Artificial sequence
  BIIB-9-3754 VL-CDR1
QASQDIANYLN

SEQ ID NO: 2128 - protein, 11 aa, Artificial sequence
  BIIB-9-3756 VL-CDR1
QASQDIANYLN

SEQ ID NO: 2129 - protein, 11 aa, Artificial sequence
  BIIB-9-3764 VL-CDR1
GANQYISDYLN

SEQ ID NO: 2130 - protein, 11 aa, Artificial sequence
  BIIB-9-3766 VL-CDR1
EASEDISNYLN

SEQ ID NO: 2131 - protein, 10 aa, Artificial sequence
  BIIB-9-3707 VL-CDR1
RASQSVSSYL

SEQ ID NO: 2132 - protein, 10 aa, Artificial sequence
  BIIB-9-3709 VL-CDR1
RASQSVSSYL

SEQ ID NO: 2133 - protein, 10 aa, Artificial sequence
  BIIB-9-3720 VL-CDR1
RASQSVSSYL

SEQ ID NO: 2134 - protein, 10 aa, Artificial sequence
  BIIB-9-3727 VL-CDR1
RASQSVSSYL

SEQ ID NO: 2135 - protein, 10 aa, Artificial sequence
  BIIB-9-3745 VL-CDR1
RASQSVSSYL

SEQ ID NO: 2136 - protein, 11 aa, Artificial sequence
  BIIB-9-3780 VL-CDR1
RASQGIDSWLA

SEQ ID NO: 2137 - protein, 11 aa, Artificial sequence
  BIIB-9-3675 VL-CDR1
RASQGIDSWLA

SEQ ID NO: 2138 - protein, 11 aa, Artificial sequence
  BIIB-9-3681 VL-CDR1
RASQGIDSWLA

SEQ ID NO: 2139 - protein, 11 aa, Artificial sequence
  BIIB-9-3684 VL-CDR1
RASQGIDSWLA

SEQ ID NO: 2140 - protein, 11 aa, Artificial sequence
  BIIB-9-3698 VL-CDR1
RASQGIDSWLA

SEQ ID NO: 2141 - protein, 11 aa, Artificial sequence
  BIIB-9-3704 VL-CDR1
RASQGIDSWLA

SEQ ID NO: 2142 - protein, 7 aa, Artificial sequence
  BIIB-9-3595 VL-CDR2
DASNLET

SEQ ID NO: 2143 - protein, 7 aa, Artificial Sequence
  BIIB-9-3601 VL-CDR2
DASNLET

SEQ ID NO: 2144 - protein, 7 aa, Artificial sequence
  BIIB-9-3604 VL-CDR2
DASNLET

SEQ ID NO: 2145 - protein, 7 aa, Artificial sequence
  BIIB-9-3617 VL-CDR2
DASNLET

SEQ ID NO: 2146 - protein, 7 aa, Artificial sequence
  BIIB-9-3618 VL-CDR2
DASNLET

SEQ ID NO: 2147 - protein, 7 aa, Artificial sequence
  BIIB-9-3621 VL-CDR2
DASNLET

SEQ ID NO: 2148 - protein, 7 aa, Artificial sequence
  BIIB-9-3647 VL-CDR2
DASNLET

SEQ ID NO: 2149 - protein, 7 aa, Artificial sequence
  BIIB-9-3649 VL-CDR2
DASNLET

SEQ ID NO: 2150 - protein, 7 aa, Artificial sequence
  BIIB-9-3650 VL-CDR2
DASNLET

SEQ ID NO: 2151 - protein, 7 aa, Artificial sequence
  BIIB-9-3654 VL-CDR2
DASNLET

SEQ ID NO: 2152 - protein, 7 aa, Artificial sequence
  BIIB-9-3753 VL-CDR2
DASNLET

SEQ ID NO: 2153 - protein, 7 aa, Artificial sequence
  BIIB-9-3754 VL-CDR2
DASNLET

SEQ ID NO: 2154 - protein, 7 aa, Artificial sequence
  BIIB-9-3756 VL-CDR2
DASNLET

SEQ ID NO: 2155 - protein, 7 aa, Artificial sequence
  BIIB-9-3764 VL-CDR2
DAANLHT

SEQ ID NO: 2156 - protein, 7 aa, Artificial sequence
  BIIB-9-3766 VL-CDR2
DASNLQY

SEQ ID NO: 2157 - protein, 7 aa, Artificial sequence
  BIIB-9-3707 VL-CDR2
DASNRAT

SEQ ID NO: 2158 - protein, 7 aa, Artificial sequence
  BIIB-9-3709 VL-CDR2
DASNRAT

SEQ ID NO: 2159 - protein, 7 aa, Artificial sequence
  BIIB-9-3720 VL-CDR2
DASNRAT

SEQ ID NO: 2160 - protein, 7 aa, Artificial sequence
  BIIB-9-3727 VL-CDR2
DASNRAT

SEQ ID NO: 2161 - protein, 7 aa, Artificial sequence
  BIIB-9-3745 VL-CDR2
DASNRAT

SEQ ID NO: 2162 - protein, 7 aa, Artificial sequence
  BIIB-9-3780 VL-CDR2
AASSLQS

SEQ ID NO: 2163 - protein, 7 aa, Artificial sequence
  BIIB-9-3675 VL-CDR2
AASSLQS

SEQ ID NO: 2164 - protein, 7 aa, Artificial sequence
  BIIB-9-3681 VL-CDR2
AASSLQS

SEQ ID NO: 2165 - protein, 7 aa, Artificial sequence
  BIIB-9-3684 VL-CDR2
AASSLQS

SEQ ID NO: 2166 - protein, 7 aa, Artificial sequence
  BIIB-9-3698 VL-CDR2
AASSLQS

SEQ ID NO: 2167 - protein, 7 aa, Artificial sequence
  BIIB-9-3704 VL-CDR2
AASSLQS

SEQ ID NO: 2168 - protein, 9 aa, Artificial sequence
  BIIB-9-3595 VL-CDR3
QQYANFPYT

SEQ ID NO: 2169 - protein, 9 aa, Artificial sequence
  BIIB-9-3601 VL-CDR3
QQYANFPYT

SEQ ID NO: 2170 - protein, 9 aa, Artificial sequence
  BIIB-9-3604 VL-CDR3
QQYANFPYT

SEQ ID NO: 2171 - protein, 9 aa, Artificial sequence
  BIIB-9-3617 VL-CDR3
QQYANFPYT

SEQ ID NO: 2172 - protein, 9 aa, Artificial sequence
  BIIB-9-3618 VL-CDR3
QQYANFPYT

SEQ ID NO: 2173 - protein, 9 aa, Artificial sequence
  BIIB-9-3621 VL-CDR3
QQYANFPYT

SEQ ID NO: 2174 - protein, 9 aa, Artificial sequence
  BIIB-9-3647 VL-CDR3
QQYANFPYT

SEQ ID NO: 2175 - protein, 9 aa, Artificial sequence
  BIIB-9-3649 VL-CDR3
QQYANFPYT

SEQ ID NO: 2176 - protein, 9 aa, Artificial sequence
  BIIB-9-3650 VL-CDR3
QQYANFPYT

SEQ ID NO: 2177 - protein, 9 aa, Artificial sequence
  BIIB-9-3654 VL-CDR3
QQYANFPYT

SEQ ID NO: 2178 - protein, 9 aa, Artificial sequence
  BIIB-9-3753 VL-CDR3
QQYANFPYT

SEQ ID NO: 2179 - protein, 9 aa, Artificial sequence
  BIIB-9-3754 VL-CDR3
QQYANFPYT

SEQ ID NO: 2180 - protein, 9 aa, Artificial sequence
  BIIB-9-3756 VL-CDR3
QQYANFPYT

SEQ ID NO: 2181 - protein, 9 aa, Artificial sequence
  BIIB-9-3764 VL-CDR3
QQYARFPYT

SEQ ID NO: 2182 - protein, 9 aa, Artificial sequence
  BIIB-9-3766 VL-CDR3
SQYANFPYT

SEQ ID NO: 2183 - protein, 9 aa, Artificial sequence
  BIIB-9-3707 VL-CDR3
QQRDNWPFT

SEQ ID NO: 2184 - protein, 9 aa, Artificial sequence
  BIIB-9-3709 VL-CDR3
QQRDNWPFT

SEQ ID NO: 2185 - protein, 9 aa, Artificial sequence
  BIIB-9-3720 VL-CDR3
QQRDNWPFT

SEQ ID NO: 2186 - protein, 9 aa, Artificial sequence
  BIIB-9-3727 VL-CDR3
QQRDNWPFT

SEQ ID NO: 2187 - protein, 9 aa, Artificial sequence
  BIIB-9-3745 VL-CDR3
QQRDNWPFT

SEQ ID NO: 2188 - protein, 9 aa, Artificial sequence
  BIIB-9-3780 VL-CDR3
QQANFLPFT

SEQ ID NO: 2189 - protein, 9 aa, Artificial sequence
  BIIB-9-3675 VL-CDR3
QQANFLPFT

SEQ ID NO: 2190 - protein, 9 aa, Artificial sequence
  BIIB-9-3681 VL-CDR3
QQANFLPFT

SEQ ID NO: 2191 - protein, 9 aa, Artificial sequence
  BIIB-9-3684 VL-CDR3
QQANFLPFT

SEQ ID NO: 2192 - protein, 9 aa, Artificial sequence
  BIIB-9-3698 VL-CDR3
QQANFLPFT

SEQ ID NO: 2193 - protein, 9 aa, Artificial sequence
  BIIB-9-3704 VL-CDR3
QQANFLPFT

SEQ ID NO: 2194 - protein, 9 aa, Artificial Sequence
  VH CDR1 consensus sequence
  misc_feature (4)..(4): Xaa is S, G or E
  misc_feature (6)..(6): Xaa is Y or F
  misc_feature (7)..(7): Xaa is S, E, G, or D
  misc_feature (9)..(9): Xaa is N, V, A, or T
  MISC_FEATURE (9)..(9)
FTFXSXXMX

SEQ ID NO: 2195 - protein, 17 aa, Artificial Sequence
  VH CDR2 consensus sequence
  MISC_FEATURE (1)..(1): Xaa is S, A, Y, or G
  MISC_FEATURE (4)..(4): Xaa is S or A
  MISC_FEATURE (5)..(5): Xaa is S, A, or G
  MISC_FEATURE (6)..(6): Xaa is S, G, or D
  MISC_FEATURE (7)..(7): Xaa is S, T, or G
  MISC_FEATURE (8)..(8): Xaa is Y or T
XISXXXXXIYYADSVKG

SEQ ID NO: 2196 - protein, 15 aa, Artificial Sequence
  VH CDR3 consensus sequence
  MISC_FEATURE (4)..(4): Xaa is L or V
ARDXGGYAGYYGMDV

SEQ ID NO: 2197 - protein, 17 aa, Artificial Sequence
  VH CDR2 consensus sequence
  MISC_FEATURE (4)..(4): Xaa is S or D
  MISC_FEATURE (5)..(5): Xaa is G or S
  MISC_FEATURE (6)..(6): Xaa is E or A
  MISC_FEATURE (10)..(10): Xaa is Y or A
  MISC_FEATURE (13)..(13): Xaa is E or D
SISXXXSYIXYAXSVKG

SEQ ID NO: 2198 - protein, 15 aa, Artificial Sequence
  VH CDR3 consensus sequence
  MISC_FEATURE (1)..(1): Xaa is A or V
  MISC_FEATURE (5)..(5): Xaa is G or S
  MISC_FEATURE (10)..(10): Xaa is Y or F
XRDVXGYAGXYGMDV

SEQ ID NO: 2199 - protein, 11 aa, Artificial Sequence
  VH CDR1 consensus sequence
  MISC_FEATURE (1)..(1): Xaa is Q, G, or E
  MISC_FEATURE (3)..(3): Xaa is S or N
  MISC_FEATURE (4)..(4): Xaa is Q or E
  MISC_FEATURE (5)..(5): Xaa is D or Y
  MISC_FEATURE (7)..(7): Xaa is A or S
  MISC_FEATURE (8)..(8): Xaa is N or D
XAXXXIXXYLN

SEQ ID NO: 2200 - protein, 7 aa, Artificial Sequence
  VH CDR2 consensus sequence
  MISC_FEATURE (3)..(3): Xaa is S or A
  MISC_FEATURE (6)..(6): Xaa is E, H or Q
  MISC_FEATURE (7)..(7): Xaa is T or Y
DAXNLXX

SEQ ID NO: 2201 - protein, 9 aa, Artificial Sequence
  VH CDR3 consensus sequence
  MISC_FEATURE (1)..(1): Xaa is Q or S
  MISC_FEATURE (5)..(5): Xaa is N or R
XQYAXFPYT

SEQ ID NO: 2202 - protein, 9 aa, Artificial Sequence
  VL CDR1 consensus sequence
  MISC_FEATURE (4)..(4): Xaa is T or H
  MISC_FEATURE (5)..(5): Xaa is S, G, or H
  MISC_FEATURE (7)..(7): Xaa is Y or P
YTFXXYXMH

SEQ ID NO: 2203 - protein, 17 aa, Artificial Sequence
  VL CDR2 consensus sequence
  MISC_FEATURE (1)..(1): Xaa is I or S
  MISC_FEATURE (6)..(6): Xaa is G or R
  MISC_FEATURE (8)..(8): Xaa is S or R
  MISC_FEATURE (10)..(10): Xaa is S or E
XINPSXGXTXYAQKFQG

SEQ ID NO: 2204 - protein, 14 aa, Artificial Sequence
  VL CDR3 consensus sequence
  MISC_FEATURE (6)..(6): Xaa is R or Q
  MISC_FEATURE (7)..(7): Xaa is V, D, L or E
  MISC_FEATURE (8)..(8): Xaa is S or V
ARDGPXXXDYYMDV

SEQ ID NO: 2205 - protein, 11 aa, Artificial Sequence
  VH CDR1 consensus sequence
  MISC_FEATURE (4)..(4): Xaa is S or A
  MISC_FEATURE (6)..(6): Xaa is S, T, G, or V
  MISC_FEATURE (7)..(7): Xaa is S or A
  MISC_FEATURE (9)..(9): Xaa is Y or A
  MISC_FEATURE (11)..(11): Xaa is G, V, N, or S
GSIXSXXYXWX

SEQ ID NO: 2206 - protein, 16 aa, Artificial Sequence
  VH CDR2 consensus sequence
  MISC_FEATURE (1)..(1): Xaa is S or Y
  MISC_FEATURE (3)..(3): Xaa is S, Y, R, T or Q
  MISC_FEATURE (4)..(4): Xaa is Y, G, P or A
  MISC_FEATURE (5)..(5): Xaa is S or Q
  MISC_FEATURE (7)..(7): Xaa is S or K
  MISC_FEATURE (9)..(9): Xaa is Y or Q
XIXXXGXTXYNPSLKS

SEQ ID NO: 2207 - protein, 12 aa, Artificial Sequence
  VH CDR3 consensus sequence
  MISC_FEATURE (10)..(10): Xaa is F or V
ARDKYQDYSXDI
